(19) United States
(12) Patent Application Publication
(10) Pub. No.: US 2022/0195462 A1
(43) Pub. Date: Jun. 23, 2022

(54) FULLY-HUMAN POST-TRANSLATIONALLY MODIFIED ANTIBODY THERAPEUTICS

(71) Applicant: REGENXBIO INC., Rockville, MD (US)

(72) Inventors: Olivier Danos, Princeton, NJ (US); Zuchun Wu, North Potomac, MD (US); Ye Liu, Clarksville, MD (US); Sherri Van Everen, Menlo Park, CA (US); Franz Gerner, Myersville, MD (US); Joseph Bruder, Gaithersburg, MD (US); Chunping Qiao, Rockville, MD (US); Devin McDougald, Boston, MA (US); Xu Wang, Falls Church, VA (US); Justin Glenn, Rockville, MD (US)

(21) Appl. No.: 17/605,486

(22) PCT Filed: Apr. 24, 2020
(86) PCT No.: PCT/US20/29802

§ 371 Date: Oct. 21, 2021

Related U.S. Application Data
(60) Provisional application No. 62/838,165, filed on Apr. 24, 2019.
(60) Provisional application No. 62/967,472, filed on Jan. 29, 2020.

(51) Int. Cl. C12N 15/86; A61P 17/00; C07K 16/40

(52) U.S. Cl. CPC C12N 15/86; A61P 17/00; A61K 2039/505; C07K 2317/21; C12N 2750/14141; C07K 16/40

(57) ABSTRACT

Provided are methods and compositions for the delivery of fully human post-translationally modified therapeutic monoclonal antibodies and antigen-binding fragments thereof. The fully human post-translationally modified therapeutic monoclonal antibodies may be delivered by gene therapy methods, e.g., as a recombinant adeno-associated vims (rAAV) vector to the appropriate tissue. Methods of manufacture of the AAV vectors, pharmaceutical compositions and methods of treatment are also provided. In addition, provided are methods of producing therapeutic antibodies that are “biobetters” as fully human post-translationally modified. These fully human post-translationally modified therapeutic antibodies may be administered to a subject in need of treatment with the therapeutic antibody.

### 0. SEQUENCE LISTING

[0001] The instant application contains a Sequence Listing which has been submitted electronically in ASCII format and is hereby incorporated by reference in its entirety. Said ASCII copy, created on Apr. 24, 2020, is named 38013_0001P1_SL.txt and is 690,185 bytes in size.

### 1. INTRODUCTION

[0002] Compositions and methods are described for the delivery of a fully human post-translationally modified (HuPTM) therapeutic monoclonal antibody (“mAb”) or the HuPTM antigen-binding fragment of a therapeutic mAb—e.g., a fully human-glycosylated (HuGly) Fab of the therapeutic mAb—to a human subject diagnosed with a disease or condition indicated for treatment with the therapeutic mAb.

### 2. BACKGROUND OF THE INVENTION

[0003] Therapeutic mAbs have been shown to be effective in treating a number of diseases and conditions. However, because these agents are effective for only a short period of time, repeated injections for long durations are often required, thereby creating considerable treatment burden for patients.

### 3. SUMMARY OF THE INVENTION

[0004] Compositions and methods are described for the delivery of a HuPTM mAb or a HuPTM antigen-binding fragment of a therapeutic mAb (for example, a fully human-glycosylated Fab (HuGlyFab) of a therapeutic mAb) to a patient (human subject) diagnosed with a disease or condition indicated for treatment with the therapeutic mAb. Such antigen-binding fragments of therapeutic mAbs include a Fab, F(ab′)2, or scFv (single-chain variable fragment) (collectively referred to herein as “antigen-binding fragment”). “HuPTM Fab” as used herein may include other antigen binding fragments of a mAb. In an alternative embodiment, full-length mAbs can be used. Delivery may be advantageously accomplished via gene therapy—e.g., by administering a viral vector or other DNA expression construct encoding a therapeutic mAb or its antigen-binding fragment (or a hyperglycosylated derivative of either) to a patient (human subject) diagnosed with a condition indicated for treatment with the therapeutic mAb—to create a permanent depot in a tissue or organ of the patient that continuously supplies the HuPTM mAb or antigen-binding fragment of the therapeutic mAb, e.g., a human-glycosylated transgene product, to a target tissue where the mAb or antigen-binding fragment there of exerts its therapeutic effect.

[0005] The HuPTM mAb or HuPTM antigen-binding fragment encoded by the transgene can include, but is not limited to, a full-length or an antigen-binding fragment of a therapeutic antibody that binds to:
[0006] Nervous system targets, including Amyloid beta (Aβ or Abeta) peptides derived from the amyloid precursor protein (APP), including but not limited solanezumab, GSK933776, and lecanemab (see FIGS. 2A-C), indicated for treating Alzheimer's disease; sortilin, including but not limited to AL-001 (see FIG. 3), for treating frontotemporal dementia (FTD); Tau protein implicated in tauopathies, including Alzheimer's disease, progressive supranuclear palsy, FTD, chronic traumatic encephalopathy, Pick's Complex, primary age-related tauopothy, including but not limited to ABBV-8E12, UCB-0107, and NI-105 (BIIB076) (see FIGS. 4A-C) for treating tauopathies; SEMA4D, including but not limited to VX15/2503 (see FIG. 5), for treating Huntington's disease and juvenile Huntington's disease; alpha-synuclein, including but not limited to prasinezumab, NI-202 (BIIB054) and MED-1341 (see FIGS. 6A-C), for treating Parkinson's disease and synucleinopathies; superoxide dismutase-1 (SOD-1), including but not limited NI-204 (see FIGS. 7A and B), for treating ALS and Alzheimer's disease; and CGRP receptor, including but not limited to eptinezumab, fremanezumab, and galcanezumab (see FIGS. 8A-C), for treating migraines and cluster headaches;
[0007] Ocular Anti-Angiogenic Targets, including but not limited to VEGF (vascular endothelial growth factor), including but not limited to sevacizumab (see FIG. 9A), for treating retinal disorders including diabetic retinopathy (DR), myopic choroidal neovascularization (mCNV), age-related macular degeneration (AMD), and macular edema; erythropoietin receptor, including but not limited to LKA-651 (see FIGS. 9B and C), indicated for treatment of retinal diseases such as retinal vein occlusion (RVO), wet AMD, and macular edema; amyloid beta (Aβ or Abeta) peptides derived from the amyloid precursor protein (APP), including but not limited to solanezumab, GSK933776, or lecanemab (see FIGS. 2A-C), for treating dry AMD; activin receptor like kinase 1 (ALK1), including but not limited to ascrinvacumab (see FIG. 10A), indicated for treating neovascular age-related macular degeneration; complement component 5 (C5), including but not limited to tesidolumab and ravulizumab (see FIGS. 10B and 10D), indicated for treating dry AMD and non-infectious uveitis, endoglin (END or CD105), including but not limited to carotuximab (see FIG. 10C), indicated for treating wet AMD and other retinal disorders caused by increased vascularization; complement component 1Q (C1Q), including but not limited to ANX-007 (see FIG. 11), indicated for treating glaucoma; and plasma protein targets, such as human complement proteins including but not limited to plasma kallikrein (pKal), including but not limited to lanadelumab (see FIG. 19) for treating diabetic retinopathy and diabetic macular edema;
[0008] Complement component 5, including but not limited to ravulizumab, indicated for treating myasthenia gravis (see FIG. 10D);
[0009] TNF-alpha, including but not limited, to adalimumab (HUMIRA®), infliximab (REMICADE®), and golimumab, indicated for treating non-infectious uveitis (see FIGS. 12A-C);
[0010] Repulsive guidance molecule-A, including but not limited to elezanumab (see FIG. 13), for treating multiple sclerosis;
[0011] Transthyretin (TTR), including but not limited to NI-301 and PRX-004 (see FIGS. 14A and B), indicated for treating amyloidosis;
[0012] Connective tissue growth factor (CTGF), including but not limited to pamrevlumab (see FIG. 15), indicated for treating fibrotic diseases (e.g. diabetic nephropathy, liver fibrosis, idiopathic pulmonary fibrosis);
[0013] Neuromyelitis optica (NMO)/Non-Infectious Uveitis targets, including the TNF-alpha targeted antibodies above, and interleukin 6 (IL6)- and interleukin 6 receptor (IL6R)-targeted antibodies, including but not limited to satralizumab, sarilumab, siltuximab, clazakizumab, sirukumab, olokizumab, gerilimzumab, and tocilizumab (see FIGS. 16A-H), indicated for treating NMO, DR, DME, and non-infectious uveitis; and CD19, including but not limited to inebilizumab (see FIG. 16I), indicated for treating NMO;
[0014] Immune response targets, including interleukin 6 (IL6)- and interleukin 6 receptor (IL6R)-targeted antibodies, including but not limited to satralizumab, sarilumab, siltuximab, clazakizumab, sirukumab, olokizumab, gerilimzumab, and tocilizumab (see FIGS. 16A-H), indicated for treating adverse immune responses, such as cytokine release syndrome, such as associated with bacterial or viral infections, and to be administered with immune effecting agents, such as CAR-T and other cell based therapies, and immunooncology agents to counteract, reduce or ameliorate detrimental immune responses associated with such therapies;
[0015] Integrin beta 7, including but not limited to etrolizumab (see FIG. 17), indicated for treating ulcerative colitis and Crohn's disease;
[0016] Sclerostin, including but not limited to romosozumab (EVENITY®) (see FIG. 18), indicated for treating osteoporosis and abnormal bone loss or weakness;
[0017] Plasma Protein targets, such as human complement proteins including but not limited to plasma kallikrein, including but not limited to lanadelumab (see FIG. 19) for treating hereditary angioedema and ocular indications, including diabetic retinopathy and diabetic macular edema; and
[0018] Anti-IL and IL Receptor and other targets for autoimmune, respiratory and allergic diseases, such as interleukin 5 (IL5), including but not limited to benralizumab (see FIG. 29A); interleukin 5 receptor (IL5R), including but not limited to reslizumab (see FIG. 29B); interleukin 13 (IL13), including but not limited to tralokinumab (see FIG. 29C); interleukin 31 receptor alpha (IL-31RA), including but not limited to nemolizumab (see FIG. 29D); immunoglobin E (IgE), including but not limited to omalizumab (see FIG. 29E); and thymic stromal lymphopoietin (TSLP), including but not limited to tezepelumab (see FIG. 29F). or antigen-binding fragments.

[0019] The recombinant vector used for delivering the transgene includes non-replicating recombinant adeno-associated virus vectors (“rAAV”). However, other viral vectors may be used, including but not limited to lentiviral vectors; vaccinia viral vectors, or non-viral expression vectors referred to as “naked DNA” constructs. Expression of the transgene can be controlled by constitutive or tissue-specific expression control elements.

[0020] Gene therapy constructs are designed such that both the heavy and light chains are expressed. The coding sequences for the heavy and light chains can be engineered in a single construct in which the heavy and light chains are separated by a cleavable linker or IRES so that separate heavy and light chain polypeptides are expressed. In certain embodiments, the coding sequences encode for a Fab or F(ab′)₂ or an scFv. In certain embodiments the full length heavy and light chains of the antibody are expressed. In other embodiments, the constructs express an scFv in which the heavy and light chain variable domains are connected via a flexible, non-cleavable linker. In certain embodiments, the construct expresses, from the N-terminus, NH₂—V_{L}-linker-V_{H}—COOH or NH₂—V_{H}-linker-V_{L}—COOH.

[0021] Therapeutic antibodies delivered by gene therapy have several advantages over injected or infused therapeutic antibodies that dissipate over time resulting in peak and trough levels. Sustained expression of the transgene product antibody, as opposed to injecting an antibody repeatedly, allows for a more consistent level of antibody to be present at the site of action, and is less risky and more convenient for patients, since fewer injections need to be made. Furthermore, antibodies expressed from transgenes are post-translationally modified in a different manner than those that are directly injected because of the different microenvironment present during and after translation. Without being bound by any particular theory, this results in antibodies that have different diffusion, bioactivity, distribution, affinity, pharmacokinetic, and immunogenicity characteristics, such that the antibodies delivered to the site of action are “biobetters” in comparison with directly injected antibodies.

[0022] In addition, antibodies expressed from transgenes in vivo are not likely to contain degradation products associated with antibodies produced by recombinant technologies, such as protein aggregation and protein oxidation. Aggregation is an issue associated with protein production and storage due to high protein concentration, surface interaction with manufacturing equipment and containers, and purification with certain buffer systems. These conditions, which promote aggregation, do not exist in transgene expression in gene therapy. Oxidation, such as methionine, tryptophan, and histidine oxidation, is also associated with protein production and storage, and is caused by stressed cell culture conditions, metal and air contact, and impurities in buffers and excipients. The proteins expressed from transgenes in vivo may also oxidize in a stressed condition. However, humans, and many other organisms, are equipped with an antioxidation defense system, which not only reduces the oxidation stress, but sometimes also repairs and/or reverses the oxidation. Thus, proteins produced in vivo are not likely to be in an oxidized form. Both aggregation and oxidation could affect the potency, pharmacokinetics (clearance), and immunogenicity.

[0023] Pharmaceutical compositions suitable for administration to human subjects comprise a suspension of the recombinant vector in a formulation buffer comprising a physiologically compatible aqueous buffer, a surfactant and optional excipients.

[0024] The invention is based, in part, on the following principles:
[0025] (i) The mAb therapeutics currently on the market are of the immunoglobulin G (IgG) isotypes, such as IgG1, IgG2, and IgG4, which in general have pharmacokinetic (PK) characteristics, such as slow clearance, long half-life, and limited tissue distribution. After intravenous administration, typical mAb serum PK profiles are biphasic with a rapid distribution phase and a slower elimination phase; thus, repeat administration is required to maintain doses required to treat chronic conditions. Moreover, the distribution of mAbs is generally limited to the vascular and interstitial spaces due to their large size and hydrophilicity. The extent of mAb partitioning from circulation into most tissues generally ranges from about 5-15%, except for brain where it is much lower. (See, e.g., Kamath, 2016, Drug Discovery Today: Technologies 21-22: 75-83, which is incorporated by reference herein in its entirety). Continuous production of HuPTMmAbs or HuPTM Fabs in situ avoids repeat administrations and allows the use of Fabs, which would otherwise have too short a systemic half-life to achieve efficacy; and the methods of administration described allow direct access to target tissues, such as the brain, where the delivery of higher doses to such tissues can be achieved.
[0026] (ii) The Fab region of a number of therapeutic mAbs possesses glycosylation sites. For example, see FIGS. 2A-2C, 3, 4A-4C, 5, 6A-6C, 7A-7B, 8A-8C, 9A-9C, 10A-10D, 11, 12A-12C, 13, 14A-14B, 15, 16A-16I, 17, 18, 19, and 29A-29F which identify consensus and non-consensus asparaginal (“N”) glycosylation sites as well as glutamine (“Q”) residues that are glycosylation sites in the Fab region of certain therapeutic mAbs. (See, e.g., Valliere-Douglass et al., 2009, J. Biol. Chem. 284: 32493-32506, and Valliere-Douglass et al., 2010, J. Biol. Chem. 285: 16012-16022, each of which is incorporated by reference in its entirety for the identification of N-linked glycosylation sites in antibodies). In addition, O-glycosylation comprises the addition of N-acetyl-galactosamine to serine or threonine residues by the enzyme. It has been demonstrated that amino acid residues present in the hinge region of antibodies can be O-glycosylated. The possibility of O-glycosylation confers another advantage to the therapeutic antibodies provided herein, as compared to, e.g., antigen-binding fragments produced in E. coli, again because the E. coli naturally does not contain machinery equivalent to that used in human O-glycosylation. (Instead, O-glycosylation in E. coli has been demonstrated only when the bacteria are modified to contain specific O-glycosylation machinery. See, e.g., Farid-Moayer et al., 2007, J. Bacteriol. 189:8088-8098.) Moreover, the Fab amino acid sequence may be modified to engineer hyperglycosylated variants (e.g., see amino acid substitutions that can be made to engineer hyperglycosylated Fab regions of therapeutic antibodies shown in FIGS. 20A and 20B; and Courtois et al., 2016, mAbs 8: 99-112 which is incorporated by reference herein in its entirety for it description of derivatives of antibodies that are hyperglycosylated on the Fab domain of the full-length antibody).
[0027] (iii) In addition to the glycosylation sites, the Fab regions can contain tyrosine (“Y”) sulfation sites in or near the CDRs; see FIGS. 2A-2C, 3, 4A-4C, 5, 6A-6C, 7A-7B, 8A-8C, 9A-9C, 10A-10D, 11, 12A-12C, 13, 14A-14B, 15, 16A-16I, 17, 18, 19, and 29A-29F which identify tyrosine-O-sulfation sites in the Fab region of certain therapeutic mAbs. (See, e.g., Yang et al., 2015, Molecules 20:2138-2164 (particularly at 2154), which is incorporated by reference in its entirety for the analysis of amino acids surrounding tyrosine residues subjected to protein tyrosine sulfation). The “rules” can be summarized as follows: Y residues with E or D within +5 to −5 position of Y, and where position −1 of Y is a neutral or acidic charged amino acid—but not a basic amino acid, e.g., R, K, or H that abolishes sulfation.
[0028] (iv) The glycosylation of Fab regions, such as those shown in FIGS. 2A-2C, 3, 4A-4C, 5, 6A-6C, 7A-7B, 8A-8C, 9A-9C, 10A-10D, 11, 12A-12C, 13, 14A-14B, 15, 16A-16I, 17, 18, 19, and 29A-29F and Fc regions (see FIG. 22 and Table 7) by human cells will result in the addition of glycans that can improve stability, half-life and reduce unwanted aggregation and/or immunogenicity of the transgene product. (See, e.g., Bovenkamp et al., 2016, J. Immunol. 196: 1435-1441 for a review of the emerging importance of Fab glycosylation; and FIG. 22 which identifies glycans that can be attached to HuGlyFab (adapted from Bondt et al., 2014, Mol & Cell Proteomics 13.1: 3029-2029)). The Fab and Fc portions of antibodies have been shown to have distinct glycosylation patterns, with Fab glycans being high in galactosylation, sialylation, and bisection (e.g., with bisecting GlcNAc) but low in fucosylation with respect to Fc glycans. (E.g., see Bondt et al., 2014, Mol. & Cell. Proteomics 13.11:3029-3039, incorporated by reference herein in its entirety for its disclosure of Fab-associated N-glycans).
[0029] (v) Significantly, glycans that are added to HuPTM mAb and HuGlyFab of the invention are highly processed complex-type N-glycans that contain 2,6-sialic acid. Such glycans are not present in (a) therapeutic mAbs produced in E. coli (which are not glycosylated at all); (b) in therapeutic antibodies produced in CHO cells that do not have the 2,6-sialyltransferase required to add 2,6-sialic acid during glycosylation; or (c) in therapeutic antibodies produced in either CHO or murine cell lines that add N-Glycolylneuraminic acid (“Neu5Gc” or “NeuGc”) which is not natural to humans (and potentially immunogenic), instead of N-Acetylneuraminic acid (“Neu5Ac”) the predominant human sialic acid. See, e.g., Dumont et al., 2015, Crit. Rev. Biotechnol. 36(6):1110-1122; Huang et al., 2006, Anal. Biochem. 349:197-207 (NeuGc is the predominant sialic acid in murine cell lines such as SP2/0 and NS0); and Song et al., 2014, Anal. Chem. 86:5661-5666, each of which is incorporated by reference herein in its entirety.
[0030] (vi) The human glycosylation pattern of the HuPTM mAb and HuGlyFab of the invention should reduce immunogenicity of the transgene product and improve efficacy. Importantly, when the full-length antibodies and antigen-binding fragments, used in accordance with the methods described herein are expressed in human target cells, the need for in vitro production in prokaryotic host cells (e.g., E. coli) or eukaryotic host cells (e.g., CHO cells or murine NS0 or SP2/0 cells) is circumvented. Instead, as a result of the methods described herein (e.g., use of human target cells to express the antigen-binding fragments), N-glycosylation sites of the full-length antibodies and antigen-binding fragments are advantageously decorated with glycans relevant to and beneficial to treatment of humans. Such an advantage is unattainable when CHO cells, murine cells, or E. coli are utilized in antibody/antigen-binding fragment production, because, e.g., (a) CHO cells lack components needed for addition of certain glycans (e.g., 2,6 sialic acid and bisecting GlcNAc); (b) CHO cells and murine cells (NS0 and SP2/0 cells) add Neu5Gc as sialic acid not typical to humans instead of Neu5Ac; (c) CHO cells can also produce an immunogenic glycan, the α-Gal antigen, which reacts with anti-α-Gal antibodies present in most individuals, which at high concentrations can trigger anaphylaxis (see, e.g., Bosques, 2010, Nat Biotech 28:1153-1156); and (d) E. coli does not naturally contain components needed for N-glycosylation.
[0031] (vii) Tyrosine-sulfation of Fab regions, such as those shown in FIGS. 2A-2C, 3, 4A-4C, 5, 6A-6C, 7A-7B, 8A-8C, 9A-9C, 10A-10D, 11, 12A-12C, 13, 14A-14B, 15, 16A-16I, 17, 18, 19, and 29A-29F—a robust post-translational process in many human cells—should result in transgene products with increased avidity for their molecular targets. Indeed, tyrosine-sulfation of the Fab of antibodies has been shown to dramatically increase avidity for antigen and activity. (See, e.g., Loos et al., 2015, PNAS 112: 12675-12680, and Choe et al., 2003, Cell 114: 161-170). Such post-translational modifications are not present on therapeutic antibodies made in E. coli (a host that does not possess the enzymes required for tyrosine-sulfation), and at best are under-represented in therapeutic mAbs made in CHO cells. CHO cells are not secretory cells and have a limited capacity for post-translational tyrosine-sulfation. (See, e.g., Mikkelsen & Ezban, 1991, Biochemistry 30: 1533-1537, especially discussion at p. 1537).

[0032] For the foregoing reasons, the production of HuPTM mAb or HuPTM Fab should result in a “biobetter” molecule for the treatment of disease accomplished via gene therapy—e.g., by administering a viral vector or other DNA expression construct encoding a full-length HuPTM mAb or HuPTM Fab of a therapeutic mAb to a patient (human subject) diagnosed with a disease indication for that mAb, to create a permanent depot in the subject that continuously supplies the human-glycosylated, sulfated transgene product produced by the subject's transduced cells. The cDNA construct for the HuPTMmAb or HuPTM Fab should include a signal peptide that ensures proper co- and post-translational processing (glycosylation and protein sulfation) by the transduced human cells.

[0033] As an alternative, or an additional treatment to gene therapy, the full-length HuTPM mAb or HuPTM Fab can be produced in human cell lines by recombinant DNA technology, and the glycoprotein can be administered to patients.

[0034] Combination therapies involving delivery of the full-length HuPTM mAb or HuPTM Fab to the patient accompanied by administration of other available treatments are encompassed by the methods provided herein. The additional treatments may be administered before, concurrently or subsequent to the gene therapy treatment. Such additional treatments can include but are not limited to co-therapy with the therapeutic mAb.

[0035] Also provided are methods of manufacturing the viral vectors, particularly the AAV based viral vectors. In specific embodiments, provided are methods of producing recombinant AAVs comprising culturing a host cell containing an artificial genome comprising a cis expression cassette flanked by AAV ITRs, wherein the cis expression cassette comprises a transgene encoding a therapeutic antibody operably linked to expression control elements that will control expression of the transgene in human cells; a trans expression cassette lacking AAV ITRs, wherein the trans expression cassette encodes an AAV rep and capsid protein operably linked to expression control elements that drive expression of the AAV rep and capsid proteins in the host cell in culture and supply the rep and cap proteins in trans; sufficient adenovirus helper functions to permit replication and packaging of the artificial genome by the AAV capsid proteins; and recovering recombinant AAV encapsidating the artificial genome from the cell culture.

[0036] The inventors have also found that full length antibodies can be expressed from AAV based vectors (see Examples 36 and 37). The nucleotide sequence encoding the heavy and light chains of the full-length antibodies may be codon optimized for expression in human cells and may have reduced numbers of CpG dimers in the sequence. Accordingly, provided are compositions comprising AAV vectors that express a transgene encoding a full-length heavy chain (including an Fc domain) and light chain of a therapeutic antibody. Methods of administration and manufacture are also provided.

### 3.1 Illustrative Embodiments

### Compositions of Matter

[0037] 1. A pharmaceutical composition for treating Alzheimer's disease (AD), frontotemporal dementia (FD), tauopathies, progressive supranuclear palsy, chronic traumatic encephalopathy, Pick's Complex, and primary age-related tauopathy, Huntington's disease, juvenile Huntington's disease, Parkinson's disease, synucleinopathies, ALS, migraines, or cluster headaches in a human subject in need thereof, comprising an adeno-associated virus (AAV) vector having:
[0038] (a) a viral capsid that is at least 95% identical to the amino acid sequence of an AAV8 capsid (SEQ ID NO: 143), AAV9 capsid (SEQ ID NO: 144), AAVrh10 capsid (SEQ ID NO: 145), an AAVrh20 capsid, an AAVrh39 capsid or an AAVcy5 capsid; and
[0039] (b) an artificial genome comprising an expression cassette flanked by AAV inverted terminal repeats (ITRs), wherein the expression cassette comprises a transgene encoding a substantially full-length or full-length mAb of an anti-amyloid beta (anti-Aβ), anti-sortilin, anti-Tau protein (anti-Tau), anti-semaphorin 4D (anti-SEMA4D), anti-alpha synuclein (anti-SNCA), anti-superoxide dismutase-1 (anti-SOD1) or anti-calcitonin gene-related peptide receptor (anti-CGRPR) monoclonal antibody (mAb), or an antigen-binding fragment thereof, operably linked to one or more regulatory sequences that control expression of the transgene in human CNS cells, human liver cells and/or human muscle cells;
[0040] wherein said AAV vector is formulated for administration to said subject, optionally wherein administration is intrathecal, intravenous, subcutaneous, intranasal, or intramuscular.

[0041] 2. The pharmaceutical composition of paragraph 1, wherein the anti-Aβ mAb is solanezumab, lecanemab, or GSK933776; the anti-sortilin mAb is AL-001; the anti-Tau mAb is ABBV-8E12, UCB-0107, or NI-105 (BIIB076); the anti-SEMA4D mAb is VX15/2503; the anti-SNCA mAb is prasinezumab, NI-202 (BIIB054), or MED-1341; the anti-SOD1 mAb is NI-2041.10D12 or NI-204.12G7; and the anti-CGRPR mAb is eptinezumab, fremanezumab, or galcanezumab.

[0042] 3. The pharmaceutical composition of paragraphs 1 or 2, wherein the antigen binding fragment is a Fab, a F(ab′)₂, or a single chain variable domain (scFv).

[0043] 4. The pharmaceutical composition of any of paragraphs 1 to 3, wherein the full-length mAb or the antigen-binding fragment comprises a heavy chain with an amino acid sequence of SEQ ID NO: 1 and optionally an Fc polypeptide with an amino acid sequence of SEQ ID NO: 290 and a light chain with an amino acid sequence of SEQ ID NO: 2; or a heavy chain with an amino acid sequence of SEQ ID NO: 3 and optionally an Fc polypeptide with an amino acid sequence of SEQ ID NO: 291 and a light chain with an amino acid sequence of SEQ ID NO: 4; or a heavy chain with an amino acid sequence of SEQ ID NO: 360 and optionally an Fc polypeptide with an amino acid sequence of SEQ ID NO: 392 and a light chain with an amino acid sequence of SEQ ID NO: 361; or a heavy chain with an amino acid sequence of SEQ ID NO: 5 and optionally an Fc polypeptide of an IgG1 isotype (e.g., an amino acid sequence of SEQ ID NO: 283) and a light chain with an amino acid sequence of SEQ ID NO: 6; or a heavy chain with an amino acid sequence of SEQ ID NO: 7 and optionally an Fc polypeptide of an IgG4 isotype (e.g., an amino acid sequence of SEQ ID NO: 285) and a light chain with an amino acid sequence of SEQ ID NO: 8; or a heavy chain with an amino acid sequence of SEQ ID NO: 9 and optionally an Fc polypeptide with an amino acid sequence of SEQ ID NO: 292 and a light chain with an amino acid sequence of SEQ ID NO: 10; or a heavy chain with an amino acid sequence of SEQ ID NO: 11 and optionally an Fc polypeptide of an IgG1 isotype (e.g., an amino acid sequence of SEQ ID NO: 283) and a light chain with an amino acid sequence of SEQ ID NO: 12; or a heavy chain with an amino acid sequence of SEQ ID NO: 13 and optionally an Fc polypeptide of an IgG4 isotype (e.g., an amino acid sequence of SEQ ID NO: 285) and a light chain with an amino acid sequence of SEQ ID NO: 14; or a heavy chain with an amino acid sequence of SEQ ID NO: 15 and optionally an Fc polypeptide with an amino acid sequence of SEQ ID NO: 293 and a light chain with an amino acid sequence of SEQ ID NO: 16; or a heavy chain with an amino acid sequence of SEQ ID NO: 17 and optionally an Fc polypeptide of an IgG1 isotype (e.g., an amino acid sequence of SEQ ID NO: 283) and a light chain with an amino acid sequence of SEQ ID NO: 18; or a heavy chain with an amino acid sequence of SEQ ID NO: 19 and optionally an Fc polypeptide with an amino acid sequence of SEQ ID NO: 294 and a light chain with an amino acid sequence of SEQ ID NO: 20; or a heavy chain with an amino acid sequence of SEQ ID NO: 21 and optionally an Fc polypeptide with an amino acid sequence of SEQ ID NO: 295 and a light chain with an amino acid sequence of SEQ ID NO: 22; or a heavy chain with an amino acid sequence of SEQ ID NO: 23 and optionally an Fc polypeptide of an IgG1 isotype (e.g., an amino acid sequence of SEQ ID NO: 283) and a light chain with an amino acid sequence of SEQ ID NO: 24; or a heavy chain with an amino acid sequence of SEQ ID NO: 25 and optionally an Fc polypeptide with an amino acid sequence of SEQ ID NO: 296 and a light chain with an amino acid sequence of SEQ ID NO: 26; or a heavy chain with an amino acid sequence of SEQ ID NO: 27 and optionally an Fc polypeptide with an amino acid sequence of SEQ ID NO: 297 and a light chain with an amino acid sequence of SEQ ID NO: 28; or a heavy chain with an amino acid sequence of SEQ ID NO: 29 and optionally an Fc polypeptide with an amino acid sequence of SEQ ID NO: 298 and a light chain with an amino acid sequence of SEQ ID NO: 30.

[0044] 5. The pharmaceutical composition of paragraph 4, wherein the transgene comprises a nucleotide sequence of SEQ ID NO: 71 encoding the heavy chain and a nucleotide sequence of SEQ ID NO: 72 encoding the light chain; or a nucleotide sequence of SEQ ID NO: 73 encoding the heavy chain and a nucleotide sequence of SEQ ID NO: 74 encoding the light chain; or a nucleotide sequence of SEQ ID NO: 376 encoding the heavy chain and a nucleotide sequence of SEQ ID NO: 377 encoding the light chain; or a nucleotide sequence of SEQ ID NO: 75 encoding the heavy chain and a nucleotide sequence of SEQ ID NO: 76 encoding the light chain; or a heavy chain with an nucleotide sequence of SEQ ID NO: 77 and a light chain with an nucleotide sequence of SEQ ID NO: 78; a heavy chain with an nucleotide sequence of SEQ ID NO: 79 and a light chain with an nucleotide sequence of SEQ ID NO: 80; or a heavy chain with an nucleotide sequence of SEQ ID NO: 81 and a light chain with an nucleotide sequence of SEQ ID NO: 82; or a heavy chain with an nucleotide sequence of SEQ ID NO: 83 and a light chain with an nucleotide sequence of SEQ ID NO: 84; or a heavy chain with an nucleotide sequence of SEQ ID NO: 85 and a light chain with an nucleotide sequence of SEQ ID NO: 86; or a heavy chain with an nucleotide sequence of SEQ ID NO: 87 and a light chain with an nucleotide sequence of SEQ ID NO: 88; or a heavy chain with an nucleotide sequence of SEQ ID NO: 89 and a light chain with an nucleotide sequence of SEQ ID NO: 90; or a heavy chain with an nucleotide sequence of SEQ ID NO: 91 and a light chain with an nucleotide sequence of SEQ ID NO: 92; or a heavy chain with an nucleotide sequence of SEQ ID NO: 93 and a light chain with an nucleotide sequence of SEQ ID NO: 94; or a heavy chain with an nucleotide sequence of SEQ ID NO: 95 and a light chain with an nucleotide sequence of SEQ ID NO: 96; or a heavy chain with an nucleotide sequence of SEQ ID NO: 97 and a light chain with an nucleotide sequence of SEQ ID NO: 98; or a heavy chain with an nucleotide sequence of SEQ ID NO: 99 and a light chain with an nucleotide sequence of SEQ ID NO: 100.

[0045] 6. The pharmaceutical composition of any of paragraphs 1 to 4, wherein the mAb or antigen-binding fragment thereof is a hyperglycosylated mutant or wherein the Fc polypeptide of the mAb is glycosylated or aglycosylated.

[0046] 7. The pharmaceutical composition of any of paragraphs 1 to 6, wherein the transgene encodes a signal sequence at the N-terminus of the heavy chain and the light chain of said antigen-binding fragment that directs secretion and post translational modification in said human CNS, muscle, or liver cells.

[0047] 8. The pharmaceutical composition of paragraph 7, wherein said signal sequence is MYRMQLLLLIALSLALVTNS (SEQ ID NO: 146) or a signal sequence from Table 2.

[0048] 9. The pharmaceutical composition of any of paragraphs 1 to 8, wherein the AAV capsid is AAV8 or AAV9.

[0049] 10. A pharmaceutical composition for treating retinal disorders including diabetic retinopathy, myopic choroidal neovascularization (mCNV), macular degeneration (e.g., neovascular (wet) or dry age-related macular degeneration (nAMD)), macular edema (e.g., macular edema following a retinal vein occlusion (RVO) or diabetic macular edema (DME)), retinal vein occlusion, diabetic retinopathy (DR), non-infectious uveitis, or glaucoma, or abnormal vascularization of the retina in a human subject in need thereof, comprising an AAV vector comprising:
[0050] (a) a viral capsid that is at least 95% identical to the amino acid sequence of an AAV2.7m8 capsid (SEQ ID NO: 142), an AAV8 capsid (SEQ ID NO: 143), an AAV9 capsid (SEQ ID NO: 144); or an AAVrh10 capsid (SEQ ID NO: 145); and
[0051] (b) an artificial genome comprising an expression cassette flanked by AAV ITRs wherein the expression cassette comprises a transgene encoding a substantially full-length or full-length mAB of an anti-vascular endothelial growth factor (anti-VEGF), anti-erythropoietin receptor (anti-EPOR), anti-Aβ, anti-activin receptor like kinase 1 (anti-ALK1), anti-complement component 5 (anti-C5), anti-endoglin (anti-ENG), anti-complement component 1Q (anti-CC1Q), or anti-pKal mAb, or an antigen-binding fragment thereof, operably linked to one or more regulatory sequences that control expression of the transgene in human retina cells;
[0052] wherein said AAV vector is formulated for subretinal, intravitreal, intranasal, or suprachoroidal administration to the subject.

[0053] 11. The pharmaceutical composition of paragraph 10, wherein the anti-VEGF mAb is sevacizumab; anti-EPOR mAb is LKA-651 (NSV2) or LKA-651 (NSV3); anti-Aβ mAb is solanezumab, lecanemab, or GSK933776; anti-ALK1 mAb is ascrinvacumab; anti-C5 mAb is tesidolumab or ravulizumab; anti-ENG mAb is carotuximab; the anti-CC1Q mAb is ANX-007; and the anti-pKal mAb is lanadelumab.

[0054] 12. The pharmaceutical composition of paragraphs 10 or 11, wherein the antigen-binding fragment is a Fab, a F(ab′)₂, or an scFv.

[0055] 13. The pharmaceutical composition of any of paragraphs 10 to 12, wherein the full-length mAb or the antigen-binding fragment comprises a heavy chain with an amino acid sequence of SEQ ID NO: 1 and optionally an Fc polypeptide with an amino acid sequence of SEQ ID NO: 290 and a light chain with an amino acid sequence of SEQ ID NO: 2; or a heavy chain with an amino acid sequence of SEQ ID NO: 360 and optionally an Fc polypeptide with an amino acid sequence of SEQ ID NO: 392 and a light chain with an amino acid sequence of SEQ ID NO: 361; or a heavy chain with an amino acid sequence of SEQ ID NO: 31 and optionally an Fc polypeptide with an amino acid sequence of SEQ ID NO: 299 and a light chain with an amino acid sequence of SEQ ID NO: 32; or a heavy chain with an amino acid sequence of SEQ ID NO: 33 and optionally an Fc polypeptide of an IgG1 isotype (e.g., an amino acid sequence of SEQ ID NO: 283) and a light chain with an amino acid sequence of SEQ ID NO: 34; or a heavy chain with an amino acid sequence of SEQ ID NO: 35 and optionally an Fc polypeptide of an IgG1 isotype (e.g., an amino acid sequence of SEQ ID NO: 283) and a light chain with an amino acid sequence of SEQ ID NO: 36; or a heavy chain with an amino acid sequence of SEQ ID NO: 3 and optionally an Fc polypeptide with an amino acid sequence of SEQ ID NO: 291 and a light chain with an amino acid sequence of SEQ ID NO: 4; or a heavy chain with an amino acid sequence of SEQ ID NO: 37 and optionally an Fc polypeptide with an amino acid sequence of SEQ ID NO: 300 and a light chain with an amino acid sequence of SEQ ID NO: 38; or a heavy chain with an amino acid sequence of SEQ ID NO: 39 and optionally an Fc polypeptide with an amino acid sequence of SEQ ID NO: 301 and a light chain with an amino acid sequence of SEQ ID NO: 40; or a heavy chain with an amino acid sequence of SEQ ID NO: 362 and optionally an Fc polypeptide with an amino acid sequence of SEQ ID NO: 393 and a light chain with an amino acid sequence of SEQ ID NO: 363; or a heavy chain with an amino acid sequence of SEQ ID NO: 41 and optionally an Fc polypeptide with an amino acid sequence of SEQ ID NO: 302 and a light chain with an amino acid sequence of SEQ ID NO: 42; or a heavy chain with an amino acid sequence of SEQ ID NO: 43 and optionally an Fc polypeptide of an IgG1 isotype (e.g., an amino acid sequence of SEQ ID NO: 283) and a light chain with an amino acid sequence of SEQ ID NO: 44; or a heavy chain with an amino acid sequence of SEQ ID NO: 69 and optionally an Fc polypeptide with an amino acid sequence of SEQ ID NO: 314 and a light chain with an amino acid sequence of SEQ ID NO: 70.

[0056] 14. The pharmaceutical composition of paragraph 13, wherein the transgene comprises a nucleotide sequence of SEQ ID NO: 71 encoding the heavy chain and a nucleotide sequence of SEQ ID NO: 72 encoding the light chain; or a nucleotide sequence of SEQ ID NO: 376 encoding the heavy chain and a nucleotide sequence of SEQ ID NO: 377 encoding the light chain; or a nucleotide sequence of SEQ ID NO: 101 encoding the heavy chain and a nucleotide sequence of SEQ ID NO: 102 encoding the light chain; or a nucleotide sequence of SEQ ID NO: 103 encoding the heavy chain and a nucleotide sequence of SEQ ID NO: 104 encoding the light chain; or a nucleotide sequence of SEQ ID NO: 105 encoding the heavy chain and a nucleotide sequence of SEQ ID NO: 106 encoding the light chain; or a nucleotide sequence of SEQ ID NO: 73 encoding the heavy chain and a nucleotide sequence of SEQ ID NO: 74 encoding the light chain; or a nucleotide sequence of SEQ ID NO: 107 encoding the heavy chain and a nucleotide sequence of SEQ ID NO: 108 encoding the light chain; or a nucleotide sequence of SEQ ID NO: 109 encoding the heavy chain and a nucleotide sequence of SEQ ID NO: 110 encoding the light chain; or a nucleotide sequence of SEQ ID NO: 378 encoding the heavy chain and a nucleotide sequence of SEQ ID NO: 379 encoding the light chain; or a nucleotide sequence of SEQ ID NO: 111 encoding the heavy chain and a nucleotide sequence of SEQ ID NO: 112 encoding the light chain; or a nucleotide sequence of SEQ ID NO: 113 encoding the heavy chain and a nucleotide sequence of SEQ ID NO: 114 encoding the light chain; or a nucleotide sequence of SEQ ID NO: 139 encoding the heavy chain and a nucleotide sequence of SEQ ID NO: 140 encoding the light chain; or a nucleotide sequence of SEQ ID NO 141, 286, 287, or 435 to 443.

[0057] 15. The pharmaceutical composition of any of paragraphs 10 to 13, wherein the mAb or antigen-binding fragment thereof is a hyperglycosylated mutant or wherein the Fc polypeptide of the mAb is glycosylated or aglycosylated.

[0058] 16. The pharmaceutical composition of any of paragraphs 10 to 15, wherein the transgene encodes a signal sequence at the N-terminus of the heavy chain and the light chain of said antigen-binding fragment that directs secretion and post translational modification in said human retina cells.

[0059] 17. The pharmaceutical composition of paragraph 16, wherein said signal sequence is MYRMQLLLLIALSLALVTNS (SEQ ID NO: 146) or a signal sequence from Table 2, Table 3 or Table 4.

[0060] 18. The pharmaceutical composition of any of paragraphs 10 to 17, wherein the AAV capsid is AAV8.

[0061] 19. A pharmaceutical composition for treating non-infectious uveitis in a human subject in need thereof, comprising an AAV vector comprising:
[0062] (a) a viral capsid that is at least 95% identical to the amino acid sequence of an AAV2.7m8 (SEQ ID NO: 142), an AAV8 capsid (SEQ ID NO: 143), an AAV9 capsid (SEQ ID NO: 144), or an AAVrh10 capsid (SEQ ID NO: 145); and
[0063] (b) an artificial genome comprising an expression cassette flanked by AAV ITRs wherein the expression cassette comprises a transgene encoding a substantially full-length or full-length anti-tumor necrosis factor-alpha (anti-TNFα) mAb or an antigen-binding fragment thereof, a substantially full-length or full-length anti-complement component 5 (C5) mAb or an antigen-binding fragment thereof, a substantially full-length or full-length anti-interleukin-6 (IL-6) mAb or an antigen-binding fragment thereof, or a substantially full-length or full-length anti-interleukin-6 receptor (IL-6R) mAb or an antigen-binding fragment thereof, operably linked to one or more regulatory sequences that control expression of the transgene in human retina cells;
[0064] wherein said AAV vector is formulated for subretinal, intravitreal, intranasal, or suprachoroidal administration to the subject.

[0065] 20. The pharmaceutical composition of paragraph 19 wherein the anti-TNFα mAb is adalimumab, infliximab or golimumab; the anti-C5 mAb is tesidolumab or ravulizumab; the anti-IL-6 mAb is siltuximab, clazakimzumab, sirukumab, olokizumab or gerilimzumab; or the anti-IL-6R mAb is satralizumab, sarilumab or tocilizumab.

[0066] 21. The pharmaceutical composition of paragraphs 19 or 20, wherein the antigen-binding fragment is a Fab, a F(ab′)₂, or an scFv.

[0067] 22. The pharmaceutical composition of any of paragraphs 19 to 21, wherein the full-length mAb or the antigen-binding fragment comprises a heavy chain with an amino acid sequence of SEQ ID NO: 45 and optionally an Fc polypeptide with an amino acid sequence of SEQ ID NO: 303 and a light chain with an amino acid sequence of SEQ ID NO: 46, or SEQ ID NO; 451, 452 or 453; or a heavy chain with an amino acid sequence of SEQ ID NO: 47 and optionally an Fc polypeptide with an amino acid sequence of SEQ ID NO: 304 and a light chain with an amino acid sequence of SEQ ID NO: 48; or a heavy chain with an amino acid sequence of SEQ ID NO: 49 and optionally an Fc polypeptide with an amino acid sequence of SEQ ID NO: 305 and a light chain with an amino acid sequence of SEQ ID NO: 50; a heavy chain with an amino acid sequence of SEQ ID NO: 39 and optionally an Fc polypeptide with an amino acid sequence of SEQ ID NO: 301 and a light chain with an amino acid sequence of SEQ ID NO: 40; a heavy chain with an amino acid sequence of SEQ ID NO: 362 and optionally an Fc polypeptide with an amino acid sequence of SEQ ID NO: 393 and a light chain with an amino acid sequence of SEQ ID NO: 363; a heavy chain with an amino acid sequence of SEQ ID NO: 331 and optionally an Fc polypeptide with an amino acid sequence of SEQ ID NO: 355 and a light chain with an amino acid sequence of SEQ ID NO: 332; a heavy chain with an amino acid sequence of SEQ ID NO: 333 and optionally an Fc polypeptide with an amino acid sequence of SEQ ID NO: 356 and a light chain with an amino acid sequence of SEQ ID NO: 334; a heavy chain with an amino acid sequence of SEQ ID NO: 335 and optionally an Fc polypeptide with an amino acid sequence of SEQ ID NO: 357 and a light chain with an amino acid sequence of SEQ ID NO: 336; a heavy chain with an amino acid sequence of SEQ ID NO: 337 and optionally an Fc polypeptide with an amino acid sequence of SEQ ID NO: 358 and a light chain with an amino acid sequence of SEQ ID NO: 338; a heavy chain with an amino acid sequence of SEQ ID NO: 339 and a light chain with an amino acid sequence of SEQ ID NO: 340; a heavy chain with an amino acid sequence of SEQ ID NO: 59 and optionally an Fc polypeptide with an amino acid sequence of SEQ ID NO: 309 and a light chain with an amino acid sequence of SEQ ID NO: 60; a heavy chain with an amino acid sequence of SEQ ID NO: 61 and optionally an Fc polypeptide with an amino acid sequence of SEQ ID NO: 310 and a light chain with an amino acid sequence of SEQ ID NO: 62; and a heavy chain with an amino acid sequence of SEQ ID NO: 341 and optionally an Fc polypeptide with an amino acid sequence of SEQ ID NO: 359 and a light chain with an amino acid sequence of SEQ ID NO: 342.

[0068] 23. The pharmaceutical composition of paragraph 22, wherein the transgene comprises a nucleotide sequence of SEQ ID NO: 115 encoding the heavy chain and a nucleotide sequence of SEQ ID NO: 116 encoding the light chain; or a nucleotide sequence of SEQ ID NO: 117 encoding the heavy chain and a nucleotide sequence of SEQ ID NO: 118 encoding the light chain; a nucleotide sequence of SEQ ID NO: 119 encoding the heavy chain and a nucleotide sequence of SEQ ID NO: 120 encoding the light chain; nucleotide sequence of SEQ ID NO: 109 encoding the heavy chain and a nucleotide sequence of SEQ ID NO: 110 encoding the light chain; or a nucleotide sequence of SEQ ID NO: 378 encoding the heavy chain and a nucleotide sequence of SEQ ID NO: 379 encoding the light chain; a nucleotide sequence of SEQ ID NO: 343 encoding the heavy chain and a nucleotide sequence of SEQ ID NO: 344 encoding the light chain; nucleotide sequence of SEQ ID NO: 345 encoding the heavy chain and a nucleotide sequence of SEQ ID NO: 346 encoding the light chain; a nucleotide sequence of SEQ ID NO: 347 encoding the heavy chain and a nucleotide sequence of SEQ ID NO: 348 encoding the light chain; a nucleotide sequence of SEQ ID NO: 349 encoding the heavy chain and a nucleotide sequence of SEQ ID NO: 350 encoding the light chain; nucleotide sequence of SEQ ID NO: 351 encoding the heavy chain and a nucleotide sequence of SEQ ID NO: 352 encoding the light chain; a nucleotide sequence of SEQ ID NO: 129 encoding the heavy chain and a nucleotide sequence of SEQ ID NO: 130 encoding the light chain; a nucleotide sequence of SEQ ID NO: 131 encoding the heavy chain and a nucleotide sequence of SEQ ID NO: 132 encoding the light chain; or nucleotide sequence of SEQ ID NO: 341 encoding the heavy chain and a nucleotide sequence of SEQ ID NO: 342 encoding the light chain.

[0069] 24. The pharmaceutical composition of any of paragraphs 19 to 22, wherein the mAb or antigen-binding fragment thereof is a hyperglycosylated mutant or wherein the Fc polypeptide of the mAb is glycosylated or aglycosylated.

[0070] 25. The pharmaceutical composition of any of paragraphs 19 to 24, wherein the transgene encodes a signal sequence at the N-terminus of the heavy chain and the light chain of said antigen-binding fragment that directs secretion and post translational modification in said human retina cells.

[0071] 26. The pharmaceutical composition of paragraph 25, wherein said signal sequence is MYRMQLLLLIALSLALVTNS (SEQ ID NO: 146) or a signal sequence from Table 2, Table 3 or Table 4.

[0072] 27. The pharmaceutical composition of any of paragraphs 19 to 26, wherein the AAV capsid is AAV8.

[0073] 28. A pharmaceutical composition for treating multiple sclerosis in a human subject in need thereof, comprising an AAV vector comprising:
[0074] (a) a viral capsid that is at least 95% identical to the amino acid sequence of an AAV8 capsid (SEQ ID NO: 143), AAV9 capsid (SEQ ID NO: 144), AAVrh10 capsid (SEQ ID NO: 145), an AAVrh20 capsid, an AAVrh39 capsid or an AAVcy5 capsid; and
[0075] (b) an artificial genome comprising an expression cassette flanked by AAV ITRs wherein the expression cassette comprises a transgene encoding a substantially full-length or full-length anti-repulsive guidance molecule-A (anti-RGMa) mAb, or an antigen-binding fragment thereof, operably linked to one or more regulatory sequences that control expression of the transgene in human CNS cells, human liver cells, and/or human muscle cells;
[0076] wherein said AAV vector is formulated for administration to the subject, optionally wherein administration is intrathecal, intravenous, subcutaneous, intranasal, or intramuscular.

[0077] 29. The pharmaceutical composition of paragraph 28 wherein the anti-RGMa mAb is elezanumab.

[0078] 30. The pharmaceutical composition of paragraphs 28 or 29, wherein the antigen-binding fragment is a Fab, a F(ab′)₂, or an scFv.

[0079] 31. The pharmaceutical composition of any of paragraphs 28 to 30, wherein the full-length mAb or the antigen-binding fragment comprises a heavy chain with an amino acid sequence of SEQ ID NO: 51 and optionally an Fc polypeptide with an amino acid sequence of SEQ ID NO: 306 and a light chain with an amino acid sequence of SEQ ID NO: 52.

[0080] 32. The pharmaceutical composition of paragraph 31, wherein the transgene comprises a nucleotide sequence of SEQ ID NO: 121 encoding the heavy chain and a nucleotide sequence of SEQ ID NO: 122 encoding the light chain.

[0081] 33. The pharmaceutical composition of any of paragraphs 28 to 31, wherein the antibody or antigen-binding fragment thereof is a hyperglycosylated mutant or wherein the Fc polypeptide of the mAb is glycosylated or aglycosylated.

[0082] 34. The pharmaceutical composition of any of paragraphs 28 to 33, wherein the transgene encodes a signal sequence at the N-terminus of the heavy chain and the light chain of said antigen-binding fragment that directs secretion and post translational modification in said human CNS cells.

[0083] 35. The pharmaceutical composition of paragraph 34, wherein said signal sequence is MYRMQLLLLIALSLALVTNS (SEQ ID NO: 146) or a signal sequence from Table 2, Table 3 or Table 4.

[0084] 36. The pharmaceutical composition of any of paragraphs 28 to 35, wherein the AAV capsid is AAV9.

[0085] 37. A pharmaceutical composition for treating amyloidosis (ATTR), familial amyloid cardiomyopathy (FAC), or familial amyloid polyneuropathy (FAP) in a human subject in need thereof, comprising an AAV vector comprising:
[0086] (a) a viral capsid that is at least 95% identical to the amino acid sequence of an AAV8 capsid (SEQ ID NO: 143), an AAV9 capsid (SEQ ID NO: 144), an AAVrh10 capsid (SEQ ID NO: 145); and
[0087] (b) an artificial genome comprising an expression cassette flanked by AAV ITRs wherein the expression cassette comprises a transgene encoding a substantially full-length or full-length anti-transthyretin (anti-TTR) mAb, or an antigen-binding fragment thereof, operably linked to one or more regulatory sequences that control expression of the transgene in human liver cells or human muscle cells;
[0088] wherein said AAV vector is formulated for subcutaneous, intramuscular or intravenous administration to the subject.

[0089] 38. The pharmaceutical composition of paragraph 37, wherein the anti-TTR mAb is NI-301 or PRX-004.

[0090] 39. The pharmaceutical composition of paragraphs 37 or 38, wherein the antigen-binding fragment is a Fab, a F(ab′)₂, or an scFv.

[0091] 40. The pharmaceutical composition of any of paragraphs 37 to 39, wherein the full-length mAb or the antigen-binding fragment comprises a heavy chain with an amino acid sequence of SEQ ID NO: 53 and optionally an Fc polypeptide of an IgG1 isotype (e.g., an amino acid sequence of SEQ ID NO: 283) and a light chain with an amino acid sequence of SEQ ID NO: 54; or a heavy chain with an amino acid sequence of SEQ ID NO: 55 and optionally an Fc polypeptide with an amino acid sequence of SEQ ID NO: 307 and a light chain with an amino acid sequence of SEQ ID NO: 56.

[0092] 41. The pharmaceutical composition of paragraph 40, wherein the transgene comprises a nucleotide sequence of SEQ ID NO: 123 encoding the heavy chain and a nucleotide sequence of SEQ ID NO: 124 encoding the light chain; or a nucleotide sequence of SEQ ID NO: 125 encoding the heavy chain and a nucleotide sequence of SEQ ID NO: 126 encoding the light chain.

[0093] 42. The pharmaceutical composition of any of paragraphs 37 to 41, wherein the mAb or antigen-binding fragment thereof is a hyperglycosylated mutant or wherein the Fc polypeptide of the mAb is glycosylated or aglycosylated.

[0094] 43. The pharmaceutical composition of any of paragraphs 37 to 42, wherein the transgene encodes a signal sequence at the N-terminus of the heavy chain and the light chain of said antigen-binding fragment that directs secretion and post translational modification in said human liver cells or human muscle cells.

[0095] 44. The pharmaceutical composition of paragraph 43, wherein said signal sequence is MYRMQLLLLIALSLALVTNS (SEQ ID NO: 146) or a signal sequence from Table 3 or Table 4.

[0096] 45. The pharmaceutical composition of any of paragraphs 37 to 44, wherein the AAV capsid is AAV8.

[0097] 46. A pharmaceutical composition for treating fibrotic disorders, pulmonary fibrosis, cystic fibrosis (CF), idiopathic pulmonary fibrosis (IPF), liver cirrhosis, atrial fibrosis, endomyocardial fibrosis, old myocardial infarction, arthrofibrosis, Crohn's disease, ulcerative colitis, mediastinal fibrosis, myelofibrosis (MF), nephrogenic systemic fibrosis (NSF), progressive massive fibrosis (PMF), and retroperitoneal fibrosis (RPF) in a human subject in need thereof, comprising an AAV vector comprising:
[0098] (a) a viral capsid that is at least 95% identical to the amino acid sequence of an AAV8 capsid (SEQ ID NO: 143), an AAV9 capsid (SEQ ID NO: 144), or AAVrh10 (SEQ ID NO: 145); and
[0099] (b) an artificial genome comprising an expression cassette flanked by AAV ITRs wherein the expression cassette comprises a transgene encoding a substantially full-length or full-length anti-connective tissue growth factor (anti-CTGF) mAb or an antigen-binding fragment thereof, operably linked to one or more regulatory sequences that control expression of the transgene in human liver cells or human muscle cells;
[0100] wherein said AAV vector is formulated for subcutaneous, intramuscular or intravenous administration to the subject.

[0101] 47. The pharmaceutical composition of paragraph 46, wherein the anti-CTGF mAb is pamrevlumab.

[0102] 48. The pharmaceutical composition of paragraphs 46 or 47, wherein the antigen-binding fragment is a Fab, a F(ab′)₂, or an scFv.

[0103] 49. The pharmaceutical composition of any of paragraphs 46 to 48, wherein the full-length mAb or the antigen-binding fragment comprises a heavy chain with an amino acid sequence of SEQ ID NO: 57 and optionally an Fc polypeptide with an amino acid sequence of SEQ ID NO: 308 and a light chain with an amino acid sequence of SEQ ID NO: 58.

[0104] 50. The pharmaceutical composition of paragraph 49, wherein the transgene comprises a nucleotide sequence of SEQ ID NO: 127 encoding the heavy chain and a nucleotide sequence of SEQ ID NO: 128 encoding the light chain.

[0105] 51. The pharmaceutical composition of any of paragraphs 44 to 50, wherein the mAb or antigen-binding fragment thereof is a hyperglycosylated mutant or wherein the Fc polypeptide of the mAb is glycosylated or aglycosylated.

[0106] 52. The pharmaceutical composition of any of paragraphs 44 to 51, wherein the transgene encodes a signal sequence at the N-terminus of the heavy chain and the light chain of said antigen-binding fragment that directs secretion and post translational modification in said human liver cells or human muscle cells.

[0107] 53. The pharmaceutical composition of paragraph 52, wherein said signal sequence is MYRMQLLLLIALSLALVTNS (SEQ ID NO: 146) or a signal sequence from Table 3 or Table 4.

[0108] 54. The pharmaceutical composition of any of paragraphs 44 to 53, wherein the AAV capsid is AAV8.

[0109] 55. A pharmaceutical composition for treating non-infectious uveitis, neuromyelitis optica (NMO), diabetic retinopathy (DR), or diabetic macular edema (DME) in a human subject in need thereof, comprising an AAV vector comprising:
[0110] (a) a viral capsid that is at least 95% identical to the amino acid sequence of an AAV8 capsid (SEQ ID NO: 143), an AAV2.7m8 capsid (SEQ ID NO: 142), an AAV9 capsid (SEQ ID NO: 144), or an AAVrh10 capsid (SEQ ID NO: 145); and
[0111] (b) an artificial genome comprising an expression cassette flanked by AAV ITRs wherein the expression cassette comprises a transgene encoding a substantially full-length or full-length mAb of an anti-interleukin-6 receptor (anti-IL6R), anti-interleukin-6 (IL6), or anti-cluster of differentiation 19 (anti-CD19) mAb, or an antigen-binding fragment thereof, operably linked to one or more regulatory sequences that control expression of the transgene in human retina cells;
[0112] wherein said AAV vector is formulated for subretinal, intravitreal, intranasal, or suprachoroidal administration to the subject.

[0113] 56. The pharmaceutical composition of paragraph 55, wherein the anti-IL6R mAb is satralizumab, sarilumab, or tocilizumab, or the anti-IL6 mAb is siltuximab, clazakizumab, sirukumab, olokizumab, or gerilimzumab, or the anti-CD19 mAb is inebilizumab.

[0114] 57. The pharmaceutical composition of paragraphs 55 or 56, wherein the antigen-binding fragment is a Fab, a F(ab′)₂, or an scFv.

[0115] 58. The pharmaceutical composition of any of paragraphs 55 to 57, wherein the full-length mAb or the antigen-binding fragment comprises a heavy chain with an amino acid sequence of SEQ ID NO: 59 and optionally an Fc polypeptide with an amino acid sequence of SEQ ID NO: 309 and a light chain with an amino acid sequence of SEQ ID NO: 60; or a heavy chain with an amino acid sequence of SEQ ID NO: 61 and optionally an Fc polypeptide with an amino acid sequence of SEQ ID NO: 310 and a light chain with an amino acid sequence of SEQ ID NO: 62; or a heavy chain with an amino acid sequence of SEQ ID NO: 331 and optionally an Fc polypeptide with an amino acid sequence of SEQ ID NO: 355 and a light chain with an amino acid sequence of SEQ ID NO: 332; or a heavy chain with an amino acid sequence of SEQ ID NO: 333 and optionally an Fc polypeptide with an amino acid sequence of SEQ ID NO: 356 and a light chain with an amino acid sequence of SEQ ID NO: 334; or a heavy chain with an amino acid sequence of SEQ ID NO: 335 and optionally an Fc polypeptide with an amino acid sequence of SEQ ID NO: 357 and a light chain with an amino acid sequence of SEQ ID NO: 336; or a heavy chain with an amino acid sequence of SEQ ID NO: 337 and optionally an Fc polypeptide with an amino acid sequence of SEQ ID NO: 358 and a light chain with an amino acid sequence of SEQ ID NO: 338; or a heavy chain with an amino acid sequence of SEQ ID NO: 339 and optionally an Fc polypeptide with an amino acid sequence of SEQ ID NO: 283 and a light chain with an amino acid sequence of SEQ ID NO: 340; or a heavy chain with an amino acid sequence of SEQ ID NO: 341 and optionally an Fc polypeptide with an amino acid sequence of SEQ ID NO: 359 and a light chain with an amino acid sequence of SEQ ID NO: 342; a heavy chain with an amino acid sequence of SEQ ID NO: 63 and optionally an Fc polypeptide with an amino acid sequence of SEQ ID NO: 311 and a light chain with an amino acid sequence of SEQ ID NO: 64.

[0116] 59. The pharmaceutical composition of paragraph 58, wherein the transgene comprises a nucleotide sequence of SEQ ID NO: 129 encoding the heavy chain and a nucleotide sequence of SEQ ID NO: 130 encoding the light chain; or a nucleotide sequence of SEQ ID NO: 131 encoding the heavy chain and a nucleotide sequence of SEQ ID NO: 132 encoding the light chain; or a nucleotide sequence of SEQ ID NO: 343 encoding the heavy chain and a nucleotide sequence of SEQ ID NO: 344 encoding the light chain; or a nucleotide sequence of SEQ ID NO: 345 encoding the heavy chain and a nucleotide sequence of SEQ ID NO: 346 encoding the light chain; or a nucleotide sequence of SEQ ID NO: 347 encoding the heavy chain and a nucleotide sequence of SEQ ID NO: 348 encoding the light chain; or a nucleotide sequence of SEQ ID NO: 349 encoding the heavy chain and a nucleotide sequence of SEQ ID NO: 350 encoding the light chain; or a nucleotide sequence of SEQ ID NO: 351 encoding the heavy chain and a nucleotide sequence of SEQ ID NO: 352 encoding the light chain; or a nucleotide sequence of SEQ ID NO: 353 encoding the heavy chain and a nucleotide sequence of SEQ ID NO: 354 encoding the light chain; or a nucleotide sequence of SEQ ID NO: 133 encoding the heavy chain and a nucleotide sequence of SEQ ID NO: 134 encoding the light chain.

[0117] 60. The pharmaceutical composition of any of paragraphs 55 to 59, wherein the mAb or antigen-binding fragment thereof is a hyperglycosylated mutant or wherein the Fc polypeptide of the mAb is glycosylated or aglycosylated.

[0118] 61. The pharmaceutical composition of any of paragraphs 55 to 60, wherein the transgene encodes a signal sequence at the N-terminus of the heavy chain and the light chain of said antigen-binding fragment that directs secretion and post translational modification in said human retinal cells.

[0119] 62. The pharmaceutical composition of paragraph 61, wherein said signal sequence is MYRMQLLLLIALSLALVTNS (SEQ ID NO: 146) or a signal sequence from Table 2, Table 3 or Table 4.

[0120] 63. The pharmaceutical composition of any of paragraphs 55 to 62, wherein the AAV capsid is AAV8.

[0121] 64. A pharmaceutical composition for treating inflammatory bowel disease (IBD) including UC and CD in a human subject in need thereof, comprising an AAV vector comprising:
[0122] (a) a viral capsid that is at least 95% identical to the amino acid sequence of an AAV8 capsid (SEQ ID NO: 143); AAV9 capsid (SEQ ID NO: 144); or AAVrh10 capsid (SEQ ID NO: 145); and
[0123] (b) an artificial genome comprising an expression cassette flanked by AAV ITRs wherein the expression cassette comprises a substantially full-length or full-length anti-integrin β7 subunit (anti-ITGB7) mAb or an antigen-binding fragment thereof, operably linked to one or more regulatory sequences that control expression of the transgene in human liver cells or human muscle cells;
[0124] wherein said AAV vector is formulated for subcutaneous, intramuscular, or intravenous administration to the subject.

[0125] 65. The pharmaceutical composition of paragraph 64, wherein the anti-ITGB7 mAb is etrolizumab.

[0126] 66. The pharmaceutical composition of paragraphs 64 or 65, wherein the antigen-binding fragment is a Fab, a F(ab′)₂, or an scFv.

[0127] 67. The pharmaceutical composition of any of paragraphs 64 to 66, wherein the full-length mAb or the antigen-binding fragment comprises a heavy chain with an amino acid sequence of SEQ ID NO: 65 and optionally an Fc polypeptide with an amino acid sequence of SEQ ID NO: 312 and a light chain with an amino acid sequence of SEQ ID NO: 66.

[0128] 68. The pharmaceutical composition of paragraph 67, wherein the transgene comprises a nucleotide sequence of SEQ ID NO: 135 encoding the heavy chain and a nucleotide sequence of SEQ ID NO: 136 encoding the light chain.

[0129] 69. The pharmaceutical composition of any of paragraphs 64 to 68, wherein the mAb or antigen-binding fragment thereof is a hyperglycosylated mutant or wherein the Fc polypeptide of the mAb is glycosylated or aglycosylated.

[0130] 70. The pharmaceutical composition of any of paragraphs 64 to 69, wherein the transgene encodes a signal sequence at the N-terminus of the heavy chain and the light chain of said antigen-binding fragment that directs secretion and post translational modification in said human liver cells or human muscle cells.

[0131] 71. The pharmaceutical composition of paragraph 70, wherein said signal sequence is MYRMQLLLLIALSLALVTNS (SEQ ID NO: 146) or a signal sequence from Table 3 or Table 4.

[0132] 72. The pharmaceutical composition of any of paragraphs 64 to 71, wherein the AAV capsid is AAV8.

[0133] 73. A pharmaceutical composition for treating osteoporosis or abnormal bone loss or weakness (e.g., treating giant cell tumor of bone, treating treatment-induced bone loss, slowing the loss of (or increasing) bone mass in breast and prostate cancer patients, preventing skeletal-related events due to bone metastasis, or for decreasing bone resorption and turnover in a human subject in need thereof, comprising an AAV vector comprising:
[0134] (a) a viral capsid that is at least 95% identical to the amino acid sequence of an AAV8 capsid (SEQ ID NO: 143); AAVrh10 capsid (SEQ ID NO: 145); or an AAV9 capsid (SEQ ID NO: 144); and
[0135] (b) an artificial genome comprising an expression cassette flanked by AAV ITRs wherein the expression cassette comprises a transgene encoding a substantially full-length or full-length anti-sclerostin (anti-SOST) mAb or an antigen-binding fragment thereof, operably linked to one or more regulatory sequences that control expression of the transgene in human liver cells or human muscle cells;
[0136] wherein said AAV vector is formulated for intravenous, intramuscular, or subcutaneous administration to the subject.

[0137] 74. The pharmaceutical composition of paragraph 73, wherein the anti-SOST mAb is romosozumab.

[0138] 75. The pharmaceutical composition of paragraphs 73 or 74, wherein the antigen-binding fragment is a Fab, a F(ab′)₂, or an scFv.

[0139] 76. The pharmaceutical composition of any of paragraphs 73 to 75, wherein the full-length mAb or the antigen-binding fragment comprises a heavy chain with an amino acid sequence of SEQ ID NO: 67 and optionally an Fc polypeptide with an amino acid sequence of SEQ ID NO: 313 and a light chain with an amino acid sequence of SEQ ID NO: 68.

[0140] 77. The pharmaceutical composition of paragraph 76, wherein the transgene comprises a nucleotide sequence of SEQ ID NO: 137 encoding the heavy chain and a nucleotide sequence of SEQ ID NO: 138 encoding the light chain.

[0141] 78. The pharmaceutical composition of any of paragraphs 73 to 77, wherein the mAb or antigen-binding fragment thereof is a hyperglycosylated mutant or wherein the Fc polypeptide of the mAb is glycosylated or aglycosylated.

[0142] 79. The pharmaceutical composition of any of paragraphs 73 to 78, wherein the transgene encodes a signal sequence at the N-terminus of the heavy chain and the light chain of said antigen-binding fragment that directs secretion and post translational modification in said human liver cells or human muscle cells.

[0143] 80. The pharmaceutical composition of paragraph 79, wherein said signal sequence is MYRMQLLLLIALSLALVTNS (SEQ ID NO: 146) or a signal sequence from Table 3 or Table 4.

[0144] 81. The pharmaceutical composition of any of paragraphs 73 to 80, wherein the AAV capsid is AAV8.

[0145] 82. A pharmaceutical composition for treating angioedema including hereditary angioedema in a human subject in need thereof, comprising an AAV vector comprising:
[0146] (a) a viral capsid that is at least 95% identical to the amino acid sequence of an AAV8 capsid (SEQ ID NO: 143); AAVrh10 capsid (SEQ ID NO: 145); or AAV9 capsid (SEQ ID NO: 144); and
[0147] (b) an artificial genome comprising an expression cassette flanked by AAV ITRs wherein the expression cassette comprises a transgene encoding a substantially full-length or full-length anti-kallikrein (anti-pKal) mAb or an antigen-binding fragment thereof, operably linked to one or more regulatory sequences that control expression of the transgene in human liver cells or human muscle cells;
[0148] wherein said AAV vector is formulated for intravenous, intramuscular, or subcutaneous administration to the subject.

[0149] 83. The pharmaceutical composition of paragraph 82, wherein the anti-pKal mAb is lanadelumab.

[0150] 84. The pharmaceutical composition of paragraphs 82 or 83, wherein the antigen-binding fragment is a Fab, a F(ab′)₂, or an scFv.

[0151] 85. The pharmaceutical composition of any of paragraphs 82 to 84, wherein the full-length mAb or the antigen-binding fragment comprises a heavy chain with an amino acid sequence of SEQ ID NO: 69 and optionally an Fc polypeptide with an amino acid sequence of SEQ ID NO: 314 and a light chain with an amino acid sequence of SEQ ID NO: 70.

[0152] 86. The pharmaceutical composition of paragraph 85, wherein the transgene comprises a nucleotide sequence of SEQ ID NO: 139 encoding the heavy chain and a nucleotide sequence of SEQ ID NO: 140 encoding the light chain; or a nucleotide sequence of SEQ ID NO 141, 286, 287, or 435 to 443.

[0153] 87. The pharmaceutical composition of any of paragraphs 82 to 85, wherein the mAb or antigen-binding fragment thereof is a hyperglycosylated mutant or wherein the Fc polypeptide of the mAb is glycosylated or aglycosylated.

[0154] 88. The pharmaceutical composition of any of paragraphs 82 to 87, wherein the transgene encodes a signal sequence at the N-terminus of the heavy chain and the light chain of said antigen-binding fragment that directs secretion and post translational modification in said human retinal cells.

[0155] 89. The pharmaceutical composition of paragraph 88, wherein said signal sequence is MYRMQLLLLIALSLALVTNS (SEQ ID NO: 146) or a signal sequence from Table 3 or Table 4.

[0156] 90. The pharmaceutical composition of any of paragraphs 82 to 89, wherein the AAV capsid is AAV8.

### Method of Treatment

[0157] 91. A method of treating Alzheimer's disease (AD), frontotemporal dementia (FD), tauopathies, progressive supranuclear palsy, chronic traumatic encephalopathy, Pick's Complex, and primary age-related tauopathy, Huntington's disease, juvenile Huntington's disease, Parkinson's disease, synucleinopathies, ALS, migraines or cluster headaches in a human subject in need thereof, comprising delivering to the cerebrospinal fluid (CSF) of said human subject, a therapeutically effective amount of a substantially full-length or full-length mAb of an anti-amyloid beta (anti-AP), anti-sortilin, anti-Tau protein (anti-Tau), anti-semaphorin 4D (anti-SEMA4D), anti-alpha synuclein (anti-SNCA), anti-superoxide dismutase-1 (anti-SOD1) or anti-calcitonin gene-related peptide receptor (anti-CGRPR) mAb, or antigen-binding fragment thereof, expressed from a transgene and produced by human CNS cells.

[0158] 92. A method of treating Alzheimer's disease, frontotemporal dementia (FD), tauopathies, progressive supranuclear palsy, chronic traumatic encephalopathy, Pick's Complex, and primary age-related tauopathy, Huntington's disease, juvenile Huntington's disease, Parkinson's disease, synucleinopathies, ALS, migraines or cluster headaches in a human subject in need thereof, comprising:
[0159] administering to said subject a therapeutically effective amount of a recombinant nucleotide expression vector comprising a transgene encoding a substantially full-length or full-length mAb of an anti-amyloid beta (anti-Aβ), anti-sortilin, anti-Tau protein (anti-Tau), anti-semaphorin 4D (anti-SEMA4D), anti-alpha synuclein (anti-SNCA), anti-superoxide dismutase-1 (anti-SOD1) or anti-calcitonin gene-related peptide receptor (anti-CGRPR) mAb, or an antigen-binding fragment thereof, operably linked to one or more regulatory sequences that control expression of the transgene in human CNS cells, so that a depot is formed that releases a human post-translationally modified (HuPTM) form of said mAb or antigen-binding fragment thereof.

[0160] 93. The method of paragraphs 91 or 92 wherein the anti-Aβ mAb is solanezumab, lecanemab, or GSK933776; the anti-sortilin mAb is AL-001; the anti-Tau mAb is ABBV-8E12, UCB-0107, or NI-105 (BIIB076); the anti-SEMA4D mAb is VX15/2503; the anti-SNCA mAb is prasinezumab, NI-202 (BIIB054), or MED-1341; the anti-SOD1 mAb is NI-2041.10D12 or NI-204.12G7; and the anti-CGRPR mAb is eptinezumab, fremanezumab, or galcanezumab.

[0161] 94. The method of any of paragraphs 91 to 93 wherein the antigen-binding fragment is a Fab, a F(ab′)₂, or an scFv.

[0162] 95. The method of any of paragraphs 91 to 94, wherein the full-length mAb or the antigen-binding fragment comprises a heavy chain with an amino acid sequence of SEQ ID NO: 1 and optionally an Fc polypeptide with an amino acid sequence of SEQ ID NO: 290 and a light chain with an amino acid sequence of SEQ ID NO: 2; or a heavy chain with an amino acid sequence of SEQ ID NO: 3 and optionally an Fc polypeptide with an amino acid sequence of SEQ ID NO: 292 and a light chain with an amino acid sequence of SEQ ID NO: 4; or a heavy chain with an amino acid sequence of SEQ ID NO: 360 and optionally an Fc polypeptide with an amino acid sequence of SEQ ID NO: 392 and a light chain with an amino acid sequence of SEQ ID NO: 361; or a heavy chain with an amino acid sequence of SEQ ID NO: 5 and optionally an Fc polypeptide of an IgG1 isotype (e.g., an amino acid sequence of SEQ ID NO: 283) and a light chain with an amino acid sequence of SEQ ID NO: 6; or a heavy chain with an amino acid sequence of SEQ ID NO: 7 and optionally an Fc polypeptide of an IgG4 isotype (e.g., an amino acid sequence of SEQ ID NO: 285) and a light chain with an amino acid sequence of SEQ ID NO: 8; or a heavy chain with an amino acid sequence of SEQ ID NO: 9 and optionally an Fc polypeptide with an amino acid sequence of SEQ ID NO: 292 and a light chain with an amino acid sequence of SEQ ID NO: 10; or a heavy chain with an amino acid sequence of SEQ ID NO: 11 and optionally an Fc polypeptide of an IgG1 isotype (e.g., an amino acid sequence of SEQ ID NO: 283) and a light chain with an amino acid sequence of SEQ ID NO: 12; or a heavy chain with an amino acid sequence of SEQ ID NO: 13 and optionally an Fc polypeptide of an IgG4 isotype (e.g., an amino acid sequence of SEQ ID NO: 285) and a light chain with an amino acid sequence of SEQ ID NO: 14; or a heavy chain with an amino acid sequence of SEQ ID NO: 15 and optionally an Fc polypeptide with an amino acid sequence of SEQ ID NO: 293 and a light chain with an amino acid sequence of SEQ ID NO: 16; or a heavy chain with an amino acid sequence of SEQ ID NO: 17 and optionally an Fc polypeptide of an IgG1 isotype (e.g., an amino acid sequence of SEQ ID NO: 283) and a light chain with an amino acid sequence of SEQ ID NO: 18; or a heavy chain with an amino acid sequence of SEQ ID NO: 19 and optionally an Fc polypeptide with an amino acid sequence of SEQ ID NO: 294 and a light chain with an amino acid sequence of SEQ ID NO: 20; or a heavy chain with an amino acid sequence of SEQ ID NO: 21 and optionally an Fc polypeptide with an amino acid sequence of SEQ ID NO: 295 and a light chain with an amino acid sequence of SEQ ID NO: 22; or a heavy chain with an amino acid sequence of SEQ ID NO: 23 and optionally an Fc polypeptide of an IgG1 isotype (e.g., an amino acid sequence of SEQ ID NO: 283) and a light chain with an amino acid sequence of SEQ ID NO: 24; or a heavy chain with an amino acid sequence of SEQ ID NO: 25 and optionally an Fc polypeptide with an amino acid sequence of SEQ ID NO: 296 and a light chain with an amino acid sequence of SEQ ID NO: 26; or a heavy chain with an amino acid sequence of SEQ ID NO: 27 and optionally an Fc polypeptide with an amino acid sequence of SEQ ID NO: 297 and a light chain with an amino acid sequence of SEQ ID NO: 28; or a heavy chain with an amino acid sequence of SEQ ID NO: 29 and optionally an Fc polypeptide with an amino acid sequence of SEQ ID NO: 298 and a light chain with an amino acid sequence of SEQ ID NO: 30.

[0163] 96. The method of paragraph 95, wherein the transgene comprises a nucleotide sequence of SEQ ID NO: 71 encoding the heavy chain and a nucleotide sequence of SEQ ID NO: 72 encoding the light chain; or a nucleotide sequence of SEQ ID NO: 73 encoding the heavy chain and a nucleotide sequence of SEQ ID NO: 74 encoding the light chain; or a nucleotide sequence of SEQ ID NO: 376 encoding the heavy chain and a nucleotide sequence of SEQ ID NO: 377 encoding the light chain; or a nucleotide sequence of SEQ ID NO: 75 encoding the heavy chain and a nucleotide sequence of SEQ ID NO: 76 encoding the light chain; or a heavy chain with an nucleotide sequence of SEQ ID NO: 77 and a light chain with an nucleotide sequence of SEQ ID NO: 78; a heavy chain with an nucleotide sequence of SEQ ID NO: 79 and a light chain with an nucleotide sequence of SEQ ID NO: 80; or a heavy chain with an nucleotide sequence of SEQ ID NO: 81 and a light chain with an nucleotide sequence of SEQ ID NO: 82; or a heavy chain with an nucleotide sequence of SEQ ID NO: 83 and a light chain with an nucleotide sequence of SEQ ID NO: 84; or a heavy chain with an nucleotide sequence of SEQ ID NO: 85 and a light chain with an nucleotide sequence of SEQ ID NO: 86; or a heavy chain with an nucleotide sequence of SEQ ID NO: 87 and a light chain with an nucleotide sequence of SEQ ID NO: 88; or a heavy chain with an nucleotide sequence of SEQ ID NO: 89 and a light chain with an nucleotide sequence of SEQ ID NO: 90; or a heavy chain with an nucleotide sequence of SEQ ID NO: 91 and a light chain with an nucleotide sequence of SEQ ID NO: 92; or a heavy chain with an nucleotide sequence of SEQ ID NO: 93 and a light chain with an nucleotide sequence of SEQ ID NO: 94; or a heavy chain with an nucleotide sequence of SEQ ID NO: 95 and a light chain with an nucleotide sequence of SEQ ID NO: 96; or a heavy chain with an nucleotide sequence of SEQ ID NO: 97 and a light chain with an nucleotide sequence of SEQ ID NO: 98; or a heavy chain with an nucleotide sequence of SEQ ID NO: 99 and a light chain with an nucleotide sequence of SEQ ID NO: 100.

[0164] 97. The method of any of paragraphs 91 to 95, wherein the mAb or antigen-binding fragment thereof is a hyperglycosylated mutant or wherein the Fc polypeptide of the mAb is glycosylated or aglycosylated.

[0165] 98. The method of any of paragraphs 91 to 97 wherein the mAb or antigen-binding fragment thereof contains an alpha 2,6-sialylated glycan.

[0166] 99. The method of any of paragraphs 91 to 98 wherein the mAb or antigen-binding fragment thereof is glycosylated but does not contain detectable NeuGc and/or α-Gal.

[0167] 100. The method of any of paragraphs 91 to 99 wherein the mAb or antigen-binding fragment thereof contains a tyrosine sulfation.

[0168] 101. The method of any of paragraphs 92 to 100 wherein the recombinant expression vector is AAV9.

[0169] 102. The method of any of paragraphs 92 to 101 in which production of said HuPTM form of said mAb or antigen-binding fragment thereof is confirmed by transducing human CNS cells in culture with said recombinant nucleotide expression vector and expressing said mAb or antigen-binding fragment thereof.

[0170] 103. A method of treating diabetic retinopathy, myopic choroidal neovascularization (mCNV), macular degeneration (e.g., neovascular (wet) or dry age-related macular degeneration (nAMD)), macular edema (e.g., macular edema following a retinal vein occlusion (RVO) or diabetic macular edema (DME)), RVO, diabetic retinopathy (DR), non-infectious uveitis, glaucoma, or abnormal vascularization of the retina in a human subject in need thereof, comprising delivering to the retina of said human subject, a therapeutically effective amount of a substantially full-length or full-length mAb of an anti-vascular endothelial growth factor (anti-VEGF), anti-erythropoietin receptor (anti-EPOR), anti-Aβ, anti-activin receptor like kinase 1 (anti-ALK1), anti-complement component 5 (anti-C5), anti-endoglin (anti-ENG), anti-complement component 1Q (anti-CC1Q)), or anti-pKal mAb, or antigen-binding fragment thereof, expressed from a transgene and produced by human retina cells.

[0171] 104. A method of treating diabetic retinopathy, myopic choroidal neovascularization (mCNV), macular degeneration (e.g., neovascular (wet) or dry age-related macular degeneration (nAMD)), macular edema (e.g., macular edema following a retinal vein occlusion (RVO) or diabetic macular edema (DME)), RVO, diabetic retinopathy (DR), non-infectious uveitis, glaucoma or abnormal vascularization of the retina in a human subject in need thereof, comprising:
[0172] administering to the retina of said subject a therapeutically effective amount of a recombinant nucleotide expression vector comprising a transgene encoding a substantially full-length or full-length mAb of an anti-vascular endothelial growth factor (anti-VEGF), anti-erythropoietin receptor (anti-EPOR), anti-Aβ, anti-activin receptor like kinase 1 (anti-ALK1), anti-complement component 5 (anti-C5), anti-endoglin (anti-ENG), anti-complement component 1Q (anti-CC1Q), or anti-pKal mAb, or an antigen-binding fragment thereof, operably linked to one or more regulatory sequences that control expression of the transgene in human retina cells, so that a depot is formed that releases a HuPTM form of mAb or antigen-binding fragment thereof.

[0173] 105. The method of paragraph 103 or 104 wherein the anti-VEGF mAb is sevacizumab; anti-EPOR mAb is LKA-651 (NSV2) or LKA-651 (NSV3); anti-Aβ mAb is solanezumab, lecanemab, or GSK933776; anti-ALK1 mAb is ascrinvacumab; anti-C5 mAb is tesidolumab or ravulizumab; anti-ENG mAb is carotuximab; the anti-CC1Q mAb is ANX-007; and the anti-pKal mAb is lanadelumab.

[0174] 106. The method of any of paragraphs 103 to 105 wherein the antigen-binding fragment is a Fab, a F(ab′)₂, or an scFv.

[0175] 107. The method of any of paragraphs 103 to 106, wherein the full-length mAb or the antigen-binding fragment comprises a heavy chain with an amino acid sequence of SEQ ID NO: 1 and optionally an Fc polypeptide with an amino acid sequence of SEQ ID NO: 290 and a light chain with an amino acid sequence of SEQ ID NO: 2; or a heavy chain with an amino acid sequence of SEQ ID NO: 360 and optionally an Fc polypeptide with an amino acid sequence of SEQ ID NO: 392 and a light chain with an amino acid sequence of SEQ ID NO: 361; or a heavy chain with an amino acid sequence of SEQ ID NO: 31 and optionally an Fc polypeptide with an amino acid sequence of SEQ ID NO: 299 and a light chain with an amino acid sequence of SEQ ID NO: 32; or a heavy chain with an amino acid sequence of SEQ ID NO: 33 and optionally an Fc polypeptide of an IgG1 isotype (e.g., an amino acid sequence of SEQ ID NO: 283) and a light chain with an amino acid sequence of SEQ ID NO: 34; or a heavy chain with an amino acid sequence of SEQ ID NO: 35 and optionally an Fc polypeptide of an IgG1 isotype (e.g., an amino acid sequence of SEQ ID NO: 283) and a light chain with an amino acid sequence of SEQ ID NO: 36; or a heavy chain with an amino acid sequence of SEQ ID NO: 3 and optionally an Fc polypeptide with an amino acid sequence of SEQ ID NO: 291 and a light chain with an amino acid sequence of SEQ ID NO: 4; or a heavy chain with an amino acid sequence of SEQ ID NO: 37 and optionally an Fc polypeptide with an amino acid sequence of SEQ ID NO: 300 and a light chain with an amino acid sequence of SEQ ID NO: 38; or a heavy chain with an amino acid sequence of SEQ ID NO: 39 and optionally an Fc polypeptide with an amino acid sequence of SEQ ID NO: 301 and a light chain with an amino acid sequence of SEQ ID NO: 40; or a heavy chain with an amino acid sequence of SEQ ID NO: 362 and optionally an Fc polypeptide with an amino acid sequence of SEQ ID NO: 393 and a light chain with an amino acid sequence of SEQ ID NO: 363; or a heavy chain with an amino acid sequence of SEQ ID NO: 41 and optionally an Fc polypeptide with an amino acid sequence of SEQ ID NO: 302 and a light chain with an amino acid sequence of SEQ ID NO: 42; or a heavy chain with an amino acid sequence of SEQ ID NO: 43 and optionally an Fc polypeptide of an IgG1 isotype (e.g., an amino acid sequence of SEQ ID NO: 283) and a light chain with an amino acid sequence of SEQ ID NO: 44; or a heavy chain with an amino acid sequence of SEQ ID NO: 69 and optionally an Fc polypeptide with an amino acid sequence of SEQ ID NO: 314 and a light chain with an amino acid sequence of SEQ ID NO: 70.

[0176] 108. The method of paragraph 107, wherein the transgene comprises a nucleotide sequence of SEQ ID NO: 71 encoding the heavy chain and a nucleotide sequence of SEQ ID NO: 72 encoding the light chain; or a nucleotide sequence of SEQ ID NO: 376 encoding the heavy chain and a nucleotide sequence of SEQ ID NO: 377 encoding the light chain; or a nucleotide sequence of SEQ ID NO: 101 encoding the heavy chain and a nucleotide sequence of SEQ ID NO: 102 encoding the light chain; or a nucleotide sequence of SEQ ID NO: 103 encoding the heavy chain and a nucleotide sequence of SEQ ID NO: 104 encoding the light chain; or a nucleotide sequence of SEQ ID NO: 105 encoding the heavy chain and a nucleotide sequence of SEQ ID NO: 106 encoding the light chain; or a nucleotide sequence of SEQ ID NO: 73 encoding the heavy chain and a nucleotide sequence of SEQ ID NO: 74 encoding the light chain; or a nucleotide sequence of SEQ ID NO: 107 encoding the heavy chain and a nucleotide sequence of SEQ ID NO: 108 encoding the light chain; or a nucleotide sequence of SEQ ID NO: 109 encoding the heavy chain and a nucleotide sequence of SEQ ID NO: 110 encoding the light chain; or a nucleotide sequence of SEQ ID NO: 378 encoding the heavy chain and a nucleotide sequence of SEQ ID NO: 379 encoding the light chain; or a nucleotide sequence of SEQ ID NO: 111 encoding the heavy chain and a nucleotide sequence of SEQ ID NO: 112 encoding the light chain; or a nucleotide sequence of SEQ ID NO: 113 encoding the heavy chain and a nucleotide sequence of SEQ ID NO: 114 encoding the light chain, or a nucleotide sequence of SEQ ID NO 141, 286, 287, or 435 to 443.

[0177] 109. The method of any of paragraphs 103 to 105, wherein the mAb or antigen-binding fragment thereof is a hyperglycosylated mutant or wherein the Fc polypeptide of the mAb is glycosylated or aglycosylated.

[0178] 110. The method of any of paragraphs 103 to 109 wherein the mAb or antigen-binding fragment thereof contains an alpha 2,6-sialylated glycan.

[0179] 111. The method of any of paragraphs 103 to 110 wherein the mAb or antigen-binding fragment thereof is glycosylated but does not contain detectable NeuGc or α-Gal.

[0180] 112. The method of any of paragraphs 103 to 111 wherein the mAb or antigen-binding fragment thereof contains a tyrosine sulfation.

[0181] 113. The method of any of paragraphs 104 to 112 wherein the recombinant expression vector is AAV2.7m8, AAV8, or AAV9.

[0182] 114. The method of any of paragraphs 104 to 113 in which production of said HuPTM form of the mAb or antigen-binding fragment thereof is confirmed by transducing human retinal cells in culture with said recombinant nucleotide expression vector and expressing said mAb or antigen-binding fragment thereof.

[0183] 115. A method of treating non-infectious uveitis in a human subject in need thereof, comprising delivering to the retina of said human subject, a therapeutically effective amount of a substantially full-length or full-length anti-tumor necrosis factor-alpha (anti-TNFα) mAb or antigen-binding fragment thereof, expressed from a transgene and produced by human retina cells.

[0184] 116. A method of treating non-infectious uveitis in a human subject in need thereof, comprising:
[0185] administering to the retina of said human subject a therapeutically effective amount of a recombinant nucleotide expression vector comprising a transgene encoding a substantially full-length or full-length anti-tumor necrosis factor-alpha (anti-TNFα) mAb, or an antigen-binding fragment thereof, a substantially full-length or full-length anti-complement component 5 (C5) mAb or an antigen-binding fragment thereof, a substantially full-length or full-length anti-interleukin-6 (IL-6) mAb or an antigen-binding fragment thereof, a substantially full-length or full-length anti-interleukin-6 receptor (IL-6R) mAb or an antigen-binding fragment thereof, operably linked to one or more regulatory sequences that control expression of the transgene in human retina cells, so that a depot is formed that releases a HuPTM form of said mAb or antigen-binding fragment.

[0186] 117. The method of paragraphs 115 or 116 wherein the anti-TNFα mAb is adalimumab, infliximab or golimumab the anti-C5 mAb is tesidolumab or ravulizumab; the anti-IL-6 mAb is siltuximab, clazakimzumab, sirukumab, olokizumab or gerilimzumab; or the anti-IL-6R mAb is satralizumab, sarilumab or tocilizumab.

[0187] 118. The method of any of paragraphs 115 to 117 wherein the antigen-binding fragment is a Fab, a F(ab′)₂, or an scFv.

[0188] 119. The method of any of paragraphs 115 to 118, wherein the full-length mAb or the antigen-binding fragment comprises a heavy chain with an amino acid sequence of SEQ ID NO: 45 and optionally an Fc polypeptide with an amino acid sequence of SEQ ID NO: 303 and a light chain with an amino acid sequence of SEQ ID NO: 46; or a heavy chain with an amino acid sequence of SEQ ID NO: 47 and optionally an Fc polypeptide with an amino acid sequence of SEQ ID NO: 304 and a light chain with an amino acid sequence of SEQ ID NO: 48; or a heavy chain with an amino acid sequence of SEQ ID NO: 49 and optionally an Fc polypeptide with an amino acid sequence of SEQ ID NO: 305; and a light chain with an amino acid sequence of SEQ ID NO: 50; a heavy chain with an amino acid sequence of SEQ ID NO: 39 and optionally an Fc polypeptide with an amino acid sequence of SEQ ID NO: 301 and a light chain with an amino acid sequence of SEQ ID NO: 40; a heavy chain with an amino acid sequence of SEQ ID NO: 362 and optionally an Fc polypeptide with an amino acid sequence of SEQ ID NO: 393 and a light chain with an amino acid sequence of SEQ ID NO: 363; a heavy chain with an amino acid sequence of SEQ ID NO: 331 and optionally an Fc polypeptide with an amino acid sequence of SEQ ID NO: 355 and a light chain with an amino acid sequence of SEQ ID NO: 332; a heavy chain with an amino acid sequence of SEQ ID NO: 333 and optionally an Fc polypeptide with an amino acid sequence of SEQ ID NO: 356 and a light chain with an amino acid sequence of SEQ ID NO: 334; a heavy chain with an amino acid sequence of SEQ ID NO: 335 and optionally an Fc polypeptide with an amino acid sequence of SEQ ID NO: 357 and a light chain with an amino acid sequence of SEQ ID NO: 336; a heavy chain with an amino acid sequence of SEQ ID NO: 337 and optionally an Fc polypeptide with an amino acid sequence of SEQ ID NO: 358 and a light chain with an amino acid sequence of SEQ ID NO: 338; a heavy chain with an amino acid sequence of SEQ ID NO: 339 and a light chain with an amino acid sequence of SEQ ID NO: 340; a heavy chain with an amino acid sequence of SEQ ID NO: 59 and optionally an Fc polypeptide with an amino acid sequence of SEQ ID NO: 309 and a light chain with an amino acid sequence of SEQ ID NO: 60; a heavy chain with an amino acid sequence of SEQ ID NO: 61 and optionally an Fc polypeptide with an amino acid sequence of SEQ ID NO: 310 and a light chain with an amino acid sequence of SEQ ID NO: 62; and a heavy chain with an amino acid sequence of SEQ ID NO: 341 and optionally an Fc polypeptide with an amino acid sequence of SEQ ID NO: 359 and a light chain with an amino acid sequence of SEQ ID NO: 342.

[0189] 120. The method of paragraph 119, wherein the transgene comprises a nucleotide sequence of SEQ ID NO: 115 encoding the heavy chain and a nucleotide sequence of SEQ ID NO: 116 encoding the light chain; or a nucleotide sequence of SEQ ID NO: 117 encoding the heavy chain and a nucleotide sequence of SEQ ID NO: 118 encoding the light chain; or a nucleotide sequence of SEQ ID NO: 119 encoding the heavy chain and a nucleotide sequence of SEQ ID NO: 120 encoding the light chain; nucleotide sequence of SEQ ID NO: 109 encoding the heavy chain and a nucleotide sequence of SEQ ID NO: 110 encoding the light chain; or a nucleotide sequence of SEQ ID NO: 378 encoding the heavy chain and a nucleotide sequence of SEQ ID NO: 379 encoding the light chain; a nucleotide sequence of SEQ ID NO: 343 encoding the heavy chain and a nucleotide sequence of SEQ ID NO: 344 encoding the light chain; nucleotide sequence of SEQ ID NO: 345 encoding the heavy chain and a nucleotide sequence of SEQ ID NO: 346 encoding the light chain; a nucleotide sequence of SEQ ID NO: 347 encoding the heavy chain and a nucleotide sequence of SEQ ID NO: 348 encoding the light chain; a nucleotide sequence of SEQ ID NO: 349 encoding the heavy chain and a nucleotide sequence of SEQ ID NO: 350 encoding the light chain; nucleotide sequence of SEQ ID NO: 351 encoding the heavy chain and a nucleotide sequence of SEQ ID NO: 352 encoding the light chain; a nucleotide sequence of SEQ ID NO: 129 encoding the heavy chain and a nucleotide sequence of SEQ ID NO: 130 encoding the light chain; a nucleotide sequence of SEQ ID NO: 131 encoding the heavy chain and a nucleotide sequence of SEQ ID NO: 132 encoding the light chain; or nucleotide sequence of SEQ ID NO: 341 encoding the heavy chain and a nucleotide sequence of SEQ ID NO: 342 encoding the light chain.

[0190] 121. The method of any of paragraphs 115 to 118, wherein the antibody or antigen-binding fragment thereof is a hyperglycosylated mutant or wherein the Fc polypeptide of the mAb is glycosylated or aglycosylated.

[0191] 122. The method of any of paragraphs 115 to 121 wherein the mAb or antigen-binding fragment thereof contains an alpha 2,6-sialylated glycan.

[0192] 123. The method of any of paragraphs 115 to 122 wherein the mAb or antigen-binding fragment thereof is glycosylated but does not contain detectable NeuGc or α-Gal.

[0193] 124. The method of any of paragraphs 115 to 123 wherein the mAb or antigen-binding fragment thereof contains a tyrosine sulfation.

[0194] 125. The method of any of paragraphs 116 to 124 wherein the recombinant expression vector is AAV2.7m8, AAV8, or AAV9.

[0195] 126. The method of any of paragraphs 116 to 125 in which production of the HuPTM form of the mAb or antigen-binding fragment thereof is confirmed by transducing human retina cells in culture with said recombinant nucleotide expression vector and expressing said mAb or antigen-binding fragment thereof.

[0196] 127. A method of treating multiple sclerosis in a human subject in need thereof, comprising delivering to the cerebrospinal fluid (CSF) of said human subject, a therapeutically effective amount of a substantially full-length or full-length anti-repulsive guidance molecule-A (anti-RGMa) mAb or antigen-binding fragment thereof, expressed from a transgene and produced by human CNS cells.

[0197] 128. A method of treating multiple sclerosis in a human subject in need thereof, comprising:
[0198] administering to the CNS of said human subject, a therapeutically effective amount of a recombinant nucleotide expression vector comprising a transgene encoding a substantially full-length or full-length anti-repulsive guidance molecule-A (anti-RGMa) mAb or antigen-binding fragment thereof, operably linked to one or more regulatory sequences that control expression of the transgene in human CNS cells, so that a depot is formed that released a HuPTM form of said mAb or antigen-binding fragment thereof.

[0199] 129. The method of paragraphs 127 or 128 wherein the anti-RGMa mAb is elezanumab.

[0200] 130. The method of any of paragraphs 127 to 129 wherein the antigen-binding fragment is a Fab, a F(ab′)₂, or an scFv.

[0201] 131. The method of any of paragraphs 127 to 130, wherein the full-length mAb or the antigen-binding fragment comprises a heavy chain with an amino acid sequence of SEQ ID NO: 51 and optionally an Fc polypeptide with an amino acid sequence of SEQ ID NO: 306 and a light chain with an amino acid sequence of SEQ ID NO: 52.

[0202] 132. The method of paragraph 131, wherein the transgene comprises a nucleotide sequence of SEQ ID NO: 121 encoding the heavy chain and a nucleotide sequence of SEQ ID NO: 122 encoding the light chain.

[0203] 133. The method of any of paragraphs 127 to 131, wherein the mAb or antigen-binding fragment thereof is a hyperglycosylated mutant or wherein the Fc polypeptide of the mAb is glycosylated or aglycosylated.

[0204] 134. The method of any of paragraphs 127 to 133 wherein the mAb or antigen-binding fragment thereof contains an alpha 2,6-sialylated glycan.

[0205] 135. The method of any of paragraphs 127 to 134 wherein the mAb or antigen-binding fragment thereof is glycosylated but does not contain detectable NeuGc or α-Gal.

[0206] 136. The method of any of paragraphs 127 to 135 wherein the mAb or antigen-binding fragment thereof contains a tyrosine sulfation.

[0207] 137. The method of any of paragraphs 128 to 136 wherein the recombinant expression vector is AAV9.

[0208] 138. The method of any of paragraphs 128 to 136 in which production of the HuPTM form of said mAb or antigen-binding fragment thereof is confirmed by transducing human CNS cells in culture with said recombinant nucleotide expression vector and expressing said mAb or antigen-binding fragment thereof.

[0209] 139. A method of treating amyloidosis (ATTR), familial amyloid cardiomyopathy (FAC), or familial amyloid polyneuropathy (FAP) in a human subject in need thereof, comprising delivering to circulation of said human subject, a therapeutically effective amount of a substantially full-length or full-length anti-transthyretin (anti-TTR) mAb or antigen-binding fragment thereof, expressed from a transgene and produced by human liver cells or human muscle cells.

[0210] 140. A method of treating asthma in a human subject in need thereof, comprising:
[0211] administering to the liver or muscle of said human subject a therapeutically effective amount of a recombinant nucleotide expression vector comprising a transgene encoding a substantially full-length or full-length anti-transthyretin (anti-TTR) mAb or an antigen-binding fragment thereof, operably linked to one or more regulatory sequences that control expression of the transgene in human liver cells or human muscle cells, so that a depot is formed that releases a HuPTM form of said mAb or antigen-binding fragment thereof.

[0212] 141. The method of paragraphs 139 or 140 wherein the anti-TTR mAb is NI-301 or PRX-004.

[0213] 142. The method of any of paragraphs 139 to 141 wherein the antigen-binding fragment is a Fab, a F(ab′)₂, or an scFv.

[0214] 143. The method of any of paragraphs 139 to 142, wherein the full-length mAb or the antigen-binding fragment comprises a heavy chain with an amino acid sequence of SEQ ID NO: 53 and optionally an Fc polypeptide of an IgG1 isotype (e.g., an amino acid sequence of SEQ ID NO: 283) and a light chain with an amino acid sequence of SEQ ID NO: 54; or a heavy chain with an amino acid sequence of SEQ ID NO: 55 and optionally an Fc polypeptide with an amino acid sequence of SEQ ID NO: 307 and a light chain with an amino acid sequence of SEQ ID NO: 56.

[0215] 144. The method of paragraph 143, wherein the transgene comprises a nucleotide sequence of SEQ ID NO: 123 encoding the heavy chain and a nucleotide sequence of SEQ ID NO: 124 encoding the light chain; or a nucleotide sequence of SEQ ID NO: 125 encoding the heavy chain and a nucleotide sequence of SEQ ID NO: 126 encoding the light chain.

[0216] 145. The method of any of paragraphs 139 to 143, wherein the antibody or antigen-binding fragment thereof is a hyperglycosylated mutant or wherein the Fc polypeptide of the mAb is glycosylated or aglycosylated.

[0217] 146. The method of any of paragraphs 139 to 145 wherein the mAb or antigen-binding fragment thereof contains an alpha2,6-sialylated glycan.

[0218] 147. The method of any of paragraphs 139 to 146 wherein the mAb or antigen-binding fragment thereof is glycosylated but does not contain detectable NeuGc or α-Gal.

[0219] 148. The method of any of paragraphs 139 to 147 wherein the mAb or antigen-binding fragment thereof contains a tyrosine sulfation.

[0220] 149. The method of any of paragraphs 140 to 148 wherein the recombinant expression vector is AAV8 or AAV9.

[0221] 150. The method of any of paragraphs 140 to 149 in which production of said HuPTM form of said mAb or antigen-binding fragment thereof is confirmed by transducing human liver cells or human muscle cells in culture with said recombinant nucleotide expression vector and expressing said mAb or antigen-binding fragment thereof.

[0222] 151. A method of treating fibrotic disorders including pulmonary fibrosis, cystic fibrosis (CF), idiopathic pulmonary fibrosis (IPF), liver cirrhosis, atrial fibrosis, endomyocardial fibrosis, old myocardial infarction, arthrofibrosis, Crohn's disease, mediastinal fibrosis, myelofibrosis (MF), nephrogenic systemic fibrosis (NSF), progressive massive fibrosis (PMF), and retroperitoneal fibrosis (RPF) in a human subject in need thereof, comprising delivering to the circulation of said human subject, a therapeutically effective amount of a substantially full-length or full-length anti-connective tissue growth factor (anti-CTGF) mAb or antigen-binding fragment thereof, expressed from a transgene and produced by human liver cells or human muscle cells.

[0223] 152. A method of treating fibrotic disorders including pulmonary fibrosis, cystic fibrosis (CF), idiopathic pulmonary fibrosis (IPF), liver cirrhosis, atrial fibrosis, endomyocardial fibrosis, old myocardial infarction, arthrofibrosis, Crohn's disease, mediastinal fibrosis, myelofibrosis (MF), nephrogenic systemic fibrosis (NSF), progressive massive fibrosis (PMF), and retroperitoneal fibrosis (RPF) in a human subject in need thereof, comprising:
[0224] administering to the liver or muscle of said human subject a therapeutically effective amount of a recombinant nucleotide expression vector comprising a transgene encoding a substantially full-length or full-length anti-connective tissue growth factor (anti-CTGF) mAb, or an antigen-binding fragment thereof, operably linked to one or more regulatory sequences that control expression of the transgene in human liver cells or human muscle cells, so that a depot is formed that releases a HuPTM form of the mAb or antigen-binding fragment thereof.

[0225] 153. The method of paragraph 151 or 152 wherein the anti-CTGF mAb is pamrevlumab.

[0226] 154. The method of any of paragraphs 151 to 153 wherein the antigen-binding fragment is a Fab, a F(ab′)₂, or an scFv.

[0227] 155. The method of any of paragraphs 151 to 154, wherein the full-length mAb or the antigen-binding fragment comprises a heavy chain with an amino acid sequence of SEQ ID NO: 57 and optionally an Fc polypeptide with an amino acid sequence of SEQ ID NO: 308 and a light chain with an amino acid sequence of SEQ ID NO: 58.

[0228] 156. The method of paragraph 155, wherein the transgene comprises a nucleotide sequence of SEQ ID NO: 127 encoding the heavy chain and a nucleotide sequence of SEQ ID NO: 128 encoding the light chain.

[0229] 157. The method of any of paragraphs 151 to 155, wherein the mAb or antigen-binding fragment thereof is a hyperglycosylated mutant or wherein the Fc polypeptide of the mAb is glycosylated or aglycosylated.

[0230] 158. The method of any of paragraphs 151 to 157 wherein the mAb or antigen-binding fragment thereof contains an alpha2,6-sialylated glycan.

[0231] 159. The method of any of paragraphs 151 to 158 wherein the mAb or antigen-binding fragment thereof is glycosylated but does not contain detectable NeuGc or α-Gal.

[0232] 160. The method of any of paragraphs 151 to 159 wherein the mAb or antigen-binding fragment thereof contains a tyrosine sulfation.

[0233] 161. The method of any of paragraphs 152 to 160 wherein the recombinant expression vector is AAV8 or AAV9.

[0234] 162. The method of any of paragraphs 152 to 161 in which production of said HuPTM form of the mAb or antigen-binding fragment thereof is confirmed by transducing human liver cells or human muscle cells in culture with said recombinant nucleotide expression vector and expressing said mAb or antigen-binding fragment thereof.

[0235] 163. A method of treating non-infectious uveitis, neuromyelitis optica (NMO), diabetic retinopathy (DR) or diabetic macular edema (DME) in a human subject in need thereof, comprising delivering to the retina of said human subject, a therapeutically effective amount of a substantially full-length or full-length mAb of an anti-interleukin-6 receptor (anti-IL6R) mAb, anti-interleukin-6 (IL6) mAb, or anti-cluster of differentiation 19 (anti-CD19) mAb, or antigen-binding fragment thereof, expressed from a transgene and produced by human retina cells.

[0236] 164. A method of treating non-infectious uveitis, neuromyelitis optica (NMO), diabetic retinopathy (DR) or diabetic macular edema (DME) in a human subject in need thereof, comprising:
[0237] administering to the retina of said human subject a therapeutically effective amount of a recombinant nucleotide expression vector comprising a transgene encoding a substantially full-length or full-length mAb of an anti-interleukin-6 receptor (anti-IL6R) mAb, anti-interleukin-6 (IL6) mAb, or anti-cluster of differentiation 19 (anti-CD19) mAb, or an antigen-binding fragment thereof, operably linked to one or more regulatory sequences that control expression of the transgene in human retina cells, so that a depot is formed that releases a HuPTM form of the mAb or antigen-binding fragment thereof.

[0238] 165. The method of paragraph 163 or 164 wherein the anti-IL6R is satralizumab, sarilumab, or tocilizumab, or the anti-IL6 mAb is siltuximab, clazakizumab, sirukumab, olokizumab, or gerilimzumab, or the anti-CD19 mAb is inebilizumab.

[0239] 166. The method of any of paragraphs 163 to 165 wherein the antigen-binding fragment is a Fab, a F(ab′)₂, or an scFv.

[0240] 167. The method of any of paragraphs 163 to 166, wherein the full-length mAb or the antigen-binding fragment comprises a heavy chain with an amino acid sequence of SEQ ID NO: 59 and optionally an Fc polypeptide with an amino acid sequence of SEQ ID NO: 309 and a light chain with an amino acid sequence of SEQ ID NO: 60; or a heavy chain with an amino acid sequence of SEQ ID NO: 61 and optionally an Fc polypeptide with an amino acid sequence of SEQ ID NO: 310 and a light chain with an amino acid sequence of SEQ ID NO: 62; or a heavy chain with an amino acid sequence of SEQ ID NO: 341 and optionally an Fc polypeptide with an amino acid sequence of SEQ ID NO: 359 and a light chain with an amino acid sequence of SEQ ID NO: 342; or a heavy chain with an amino acid sequence of SEQ ID NO: 331 and optionally an Fc polypeptide with an amino acid sequence of SEQ ID NO: 355 and a light chain with an amino acid sequence of SEQ ID NO: 332; or a heavy chain with an amino acid sequence of SEQ ID NO: 333 and optionally an Fc polypeptide with an amino acid sequence of SEQ ID NO: 356 and a light chain with an amino acid sequence of SEQ ID NO: 334; or a heavy chain with an amino acid sequence of SEQ ID NO: 335 and optionally an Fc polypeptide with an amino acid sequence of SEQ ID NO: 357 and a light chain with an amino acid sequence of SEQ ID NO: 336; or a heavy chain with an amino acid sequence of SEQ ID NO: 337 and optionally an Fc polypeptide with an amino acid sequence of SEQ ID NO: 358 and a light chain with an amino acid sequence of SEQ ID NO: 338; or a heavy chain with an amino acid sequence of SEQ ID NO: 339 and optionally an Fc polypeptide with an IgG1 amino acid sequence of SEQ ID NO: 283 and a light chain with an amino acid sequence of SEQ ID NO: 340; or a heavy chain with an amino acid sequence of SEQ ID NO: 341 and optionally an Fc polypeptide with an amino acid sequence of SEQ ID NO: 359 and a light chain with an amino acid sequence of SEQ ID NO: 342; a heavy chain with an amino acid sequence of SEQ ID NO: 63 and optionally an Fc polypeptide with an amino acid sequence of SEQ ID NO: 311 and a light chain with an amino acid sequence of SEQ ID NO: 64.

[0241] 168. The method of paragraph 167, wherein the transgene comprises a nucleotide sequence of SEQ ID NO: 129 encoding the heavy chain and a nucleotide sequence of SEQ ID NO: 130 encoding the light chain; or a nucleotide sequence of SEQ ID NO: 131 encoding the heavy chain and a nucleotide sequence of SEQ ID NO: 132 encoding the light chain; or a nucleotide sequence of SEQ ID NO: 343 encoding the heavy chain and a nucleotide sequence of SEQ ID NO: 344 encoding the light chain; or a nucleotide sequence of SEQ ID NO: 345 encoding the heavy chain and a nucleotide sequence of SEQ ID NO: 346 encoding the light chain; or a nucleotide sequence of SEQ ID NO: 347 encoding the heavy chain and a nucleotide sequence of SEQ ID NO: 348 encoding the light chain; or a nucleotide sequence of SEQ ID NO: 349 encoding the heavy chain and a nucleotide sequence of SEQ ID NO: 350 encoding the light chain; or a nucleotide sequence of SEQ ID NO: 351 encoding the heavy chain and a nucleotide sequence of SEQ ID NO: 352 encoding the light chain; or a nucleotide sequence of SEQ ID NO: 353 encoding the heavy chain and a nucleotide sequence of SEQ ID NO: 354 encoding the light chain; or a nucleotide sequence of SEQ ID NO: 133 encoding the heavy chain and a nucleotide sequence of SEQ ID NO: 134 encoding the light chain.

[0242] 169. The method of any of paragraphs 163 to 167, wherein the mAb or antigen-binding fragment thereof is a hyperglycosylated mutant or wherein the Fc polypeptide of the mAb is glycosylated or aglycosylated.

[0243] 170. The method of any of paragraphs 163 to 168 wherein the mAb or antigen-binding fragment thereof contains an alpha 2,6-sialylated glycan.

[0244] 171. The method of any of paragraphs 163 to 169 wherein the mAb or antigen-binding fragment thereof is glycosylated but does not contain detectable NeuGc or α-Gal.

[0245] 172. The method of any of paragraphs 163 to 170 wherein the mAb or antigen-binding fragment thereof contains a tyrosine sulfation.

[0246] 173. The method of any of paragraphs 164 to 171 wherein the recombinant expression vector is AAV8, AAV2.7m8 or AAV9.

[0247] 174. The method of any of paragraphs 164 to 172 in which production of said HuPTM form of said mAb or antigen-binding fragment thereof is confirmed by transducing human retina cells in culture with said recombinant nucleotide expression vector and expressing said mAb or antigen-binding fragment thereof.

[0248] 175. A method of treating inflammatory bowel disease (IBD) including UC and CD in a human subject in need thereof, comprising delivering to the circulation of said human subject, a therapeutically effective amount of a substantially full-length or full-length anti-integrin 137 subunit (anti-ITGB7) mAb or antigen-binding fragment thereof, expressed from a transgene and produced by human liver cells or human muscle cells.

[0249] 176. A method of treating inflammatory bowel disease (IBD) including UC and CD in a human subject in need thereof, comprising:
[0250] administering to the liver or muscle of said human subject a therapeutically effective amount of a recombinant nucleotide expression vector comprising a transgene encoding a substantially full-length or full-length anti-integrin β7 subunit (anti-ITGB7) mAb or an antigen-binding fragment thereof, operably linked to one or more regulatory sequences that control expression of the transgene in human liver cells or human muscle cells, so that a depot is formed that releases a HuPTM form of said mAb or antigen-binding fragment thereof.

[0251] 177. The method of paragraph 175 or 176 wherein the anti-ITGB7 mAb is etrolizumab.

[0252] 178. The method of any of paragraphs 175 to 177 wherein the antigen-binding fragment is a Fab, a F(ab′)₂, or an scFv.

[0253] 179. The method of any of paragraphs 175 to 178, wherein the full-length mAb or the antigen-binding fragment comprises a heavy chain with an amino acid sequence of SEQ ID NO: 65 and optionally an Fc polypeptide with an amino acid sequence of SEQ ID NO: 312 and a light chain with an amino acid sequence of SEQ ID NO: 66.

[0254] 180. The method of paragraph 179, wherein the transgene comprises a nucleotide sequence of SEQ ID NO: 135 encoding the heavy chain and a nucleotide sequence of SEQ ID NO: 136 encoding the light chain.

[0255] 181. The method of any of paragraphs 175 to 179, wherein the mAb or antigen-binding fragment thereof is a hyperglycosylated mutant or wherein the Fc polypeptide of the mAb is glycosylated or aglycosylated.

[0256] 182. The method of any of paragraphs 175 to 181 wherein the mAb or antigen-binding fragment thereof contains an alpha 2,6-sialylated glycan.

[0257] 183. The method of any of paragraphs 175 to 182 wherein the mAb or antigen-binding fragment thereof is glycosylated but does not contain detectable NeuGc or α-Gal.

[0258] 184. The method of any of paragraphs 175 to 183 wherein the mAb or antigen-binding fragment thereof contains a tyrosine sulfation.

[0259] 185. The method of any of paragraphs 176 to 184 wherein the recombinant expression vector is AAV8 or AAV9.

[0260] 186. The method of any of paragraphs 176 to 185 in which production of said HuPTM form of said mAb or antigen-binding fragment thereof is confirmed by transducing human liver cells or human muscle cells in culture with said recombinant nucleotide expression vector and expressing said mAb or antigen-binding fragment thereof.

[0261] 187. A method of treating systemic osteoporosis or abnormal bone loss or weakness (e.g., treating giant cell tumor of bone, treating treatment-induced bone loss, slowing the loss of (or increasing) bone mass in breast and prostate cancer patients, preventing skeletal-related events due to bone metastasis or for decreasing bone resorption and turnover in a human subject in need thereof, comprising delivering to the circulation of said human subject, a therapeutically effective amount of a substantially full-length or full-length anti-sclerostin (anti-SOST) mAb or antigen-binding fragment thereof, expressed from a transgene and produced by human liver cells or human muscle cells.

[0262] 188. A method of treating osteoporosis or abnormal bone loss or weakness (e.g., treating giant cell tumor of bone, treating treatment-induced bone loss, slowing the loss of (or increasing) bone mass in breast and prostate cancer patients, preventing skeletal-related events due to bone metastasis or for decreasing bone resorption and turnover in a human subject in need thereof, comprising:
[0263] administering to the liver or muscle of said subject a therapeutically effective amount of a recombinant nucleotide expression vector comprising a transgene encoding a substantially full-length or full-length anti-sclerostin (anti-SOST) mAb or an antigen-binding fragment thereof, operably linked to one or more regulatory sequences that control expression of the transgene in human liver cells or in human muscle cells, so that a depot is formed that releases a HuPTM form of said mAb or antigen-binding fragment thereof.

[0264] 189. The method of paragraph 187 or 188 wherein the anti-SOST mAb is romosozumab.

[0265] 190. The method of any of paragraphs 187 to 189 wherein the antigen-binding fragment is a Fab, a F(ab′)₂, or an scFv.

[0266] 191. The method of any of paragraphs 187 to 190, wherein the full-length mAb or the antigen-binding fragment comprises a heavy chain with an amino acid sequence of SEQ ID NO: 67 and optionally an Fc polypeptide with an amino acid sequence of SEQ ID NO: 313 and a light chain with an amino acid sequence of SEQ ID NO: 68.

[0267] 192. The method of paragraph 191, wherein the transgene comprises a nucleotide sequence of SEQ ID NO: 137 encoding the heavy chain and a nucleotide sequence of SEQ ID NO: 138 encoding the light chain.

[0268] 193. The method of any of paragraphs 187 to 191, wherein the mAb or antigen-binding fragment thereof is a hyperglycosylated mutant or wherein the Fc polypeptide of the mAb is glycosylated or aglycosylated.

[0269] 194. The method of any of paragraphs 187 to 193 wherein the mAb or antigen-binding fragment thereof contains an alpha2,6-sialylated glycan.

[0270] 195. The method of any of paragraphs 187 to 194 wherein the mAb or antigen-binding fragment thereof is glycosylated but does not contain detectable NeuGc or α-Gal.

[0271] 196. The method of any of paragraphs 187 to 195 wherein the mAb or antigen-binding fragment thereof contains a tyrosine sulfation.

[0272] 197. The method of any of paragraphs 188 to 196 wherein the recombinant expression vector is AAV8 or AAV9.

[0273] 198. The method of any of paragraphs 188 to 196 in which production of said HuPTM form of said mAb or antigen-binding fragment thereof is confirmed by transducing human liver cells or human muscle cells in culture with said recombinant nucleotide expression vector and expressing said mAb or antigen-binding fragment thereof.

[0274] 199. A method of treating angioedema in a human subject in need thereof, comprising delivering to the circulation of said human subject, a therapeutically effective amount of a substantially full-length or full-length anti-kallikrein (anti-pKal) mAb or antigen-binding fragment thereof, expressed from a transgene and produced by human muscle cells or human liver cells.

[0275] 200. A method of treating angioedema in a human subject in need thereof, comprising:
[0276] administering to the muscle or liver of said subject, a therapeutically effective amount of a recombinant nucleotide expression vector comprising a transgene encoding a substantially full-length or full-length anti-kallikrein (anti-pKal) mAb or an antigen-binding fragment thereof, operably linked to one or more regulatory sequences that control expression of the transgene in human muscle cells or human liver cells, so that a depot is formed that releases a HuPTM form of said mAb or antigen-binding fragment thereof.

[0277] 201. The method of paragraph 199 or 200 wherein the anti-pKal mAb is lanadelumab.

[0278] 202. The method of any of paragraphs 199 to 201 wherein the antigen-binding fragment is a Fab, a F(ab′)₂, or an scFv.

[0279] 203. The method of any of paragraphs 199 to 202, wherein the full-length mAb or the antigen-binding fragment comprises a heavy chain with an amino acid sequence of SEQ ID NO: 69 and optionally an Fc polypeptide with an amino acid sequence of SEQ ID NO: 314 and a light chain with an amino acid sequence of SEQ ID NO: 70.

[0280] 204. The method of paragraph 203, wherein the transgene comprises a nucleotide sequence of SEQ ID NO: 139 encoding the heavy chain and a nucleotide sequence of SEQ ID NO: 140 encoding the light chain.

[0281] 205. The method of any of paragraphs 199 to 203, wherein the mAb or antigen-binding fragment thereof is a hyperglycosylated mutant or wherein the Fc polypeptide of the mAb is glycosylated or aglycosylated.

[0282] 206. The method of any of paragraphs 199 to 205 wherein the mAb or antigen-binding fragment thereof contains an alpha 2,6-sialylated glycan.

[0283] 207. The method of any of paragraphs 199 to 206 wherein the mAb or antigen-binding fragment thereof is glycosylated but does not contain detectable NeuGc or α-Gal.

[0284] 208. The method of any of paragraphs 199 to 207 wherein the mAb or antigen-binding fragment thereof contains a tyrosine sulfation.

[0285] 209. The method of any of paragraphs 200 to 208 wherein the recombinant expression vector is AAV8 or AAV9.

[0286] 210. The method of any of paragraphs 200 to 209 in which production of said HuPTM form of said mAb or antigen-binding fragment thereof is confirmed by transducing human liver cells or human muscle cells in culture with said recombinant nucleotide expression vector and expressing said mAb or antigen-binding fragment thereof.

### Method of Manufacture

[0287] 211. A method of producing recombinant AAVs comprising:
[0288] (a) culturing a host cell containing:
   [0289] (i) an artificial genome comprising a cis expression cassette flanked by AAV ITRs, wherein the cis expression cassette comprises a transgene encoding a therapeutic antibody operably linked to expression control elements that will control expression of the transgene in human cells;
   [0290] (ii) a trans expression cassette lacking AAV ITRs, wherein the trans expression cassette encodes an AAV rep and an AAV capsid protein operably linked to expression control elements that drive expression of the AAV rep and the AAV capsid protein in the host cell in culture and supply the AAV rep and the AAV capsid protein in trans;
   [0291] (iii) sufficient adenovirus helper functions to permit replication and packaging of the artificial genome by the AAV capsid protein; and
[0292] (b) recovering recombinant AAV encapsidating the artificial genome from the cell culture.

[0293] 212. The method of paragraph 211, wherein the transgene encodes a substantially full-length or full-length mAb or antigen binding fragment that comprises the heavy and light chain variable domains of solanezumab, lecanemab, GSK933776, AL-001, ABBV-8E12, UCB-0107, NI-105 (BIIB076), VX15/2503, prasinezumab, NI-202 (BIIB054), MED-1341, NI-2041.10D12, NI-204.12G7, eptinezumab, fremanezumab, galcanezumab, or elezanumab.

[0294] 213. The method of paragraph 212, wherein the AAV capsid protein is an AAV9, AAVrh10, AAVrh20, AAVrh39, or AAVcy5 capsid protein.

[0295] 214. The method of paragraph 211, wherein the transgene encodes a substantially full-length or full-length mAb or antigen binding fragment that comprises the heavy and light chain variable domains of sevacizumab, LKA-651 (NSV2), LKA-651 (NSV3), GSK933776, solanezumab, lecanemab, ascrinvacumab, tesidolumab, ravulizumab, carotuximab, ANX-007, lanadelumab, adalimumab, infliximab, golimumab, satralizumab, sarilumab, tocilizumab, siltuximab, clazakizumab, sirukumab, olokizumab, gerilimzumab, or inebilizumab.

[0296] 215. The method of paragraph 214, wherein the AAV capsid protein is an AAV2.7m8, AAV8, or AAV9 capsid protein.

[0297] 216. The method of paragraph 211, wherein the transgene encodes a substantially full-length or full-length mAb or antigen binding fragment that comprises the heavy and light chain variable domains of NI-301, PRX-004, pamrevlumab, etrolizumab, romosozumab, or lanadelumab.

[0298] 217. The method of paragraph 216, wherein the AAV capsid protein is an AAV8, AAV9, or AAVrh10 capsid protein.

[0299] 218. The method of paragraph 211, wherein the transgene encodes a substantially full-length or full-length mAb.

### Autoimmune, Respiratory, and Allergic Disease

[0300] Compositions of Matter

[0301] 219. A pharmaceutical composition for treating atopic dermatitis in a human subject in need thereof, comprising an AAV vector comprising:
[0302] (a) a viral capsid that is at least 95% identical to the amino acid sequence of an AAV8 capsid (SEQ ID NO: 143), an AAV9 capsid (SEQ ID NO: 144), or an AAVrh10 capsid (SEQ ID NO: 145); and
[0303] (b) an artificial genome comprising an expression cassette flanked by AAV ITRs wherein the expression cassette comprises a transgene encoding an anti-IL13 mAb or anti-IL31RA, or an antigen-binding fragment thereof, operably linked to one or more regulatory sequences that control expression of the transgene in human liver cells or human muscle cells;
[0304] wherein said AAV vector is formulated for intravenous administration to the liver or muscle of said subject.

[0305] 220. The pharmaceutical composition of paragraph 219 wherein the anti-IL13 or the IL31RA is tralokinumab or nemolizumab.

[0306] 221. The pharmaceutical composition of paragraphs 219 or 220, wherein the antigen-binding fragment is a Fab, a F(ab′)₂, or an scFv.

[0307] 222. The pharmaceutical composition of any of paragraphs 219 to 221, wherein the antigen-binding fragment comprises a heavy chain with an amino acid sequence of SEQ ID NO: 368 and optionally an Fc polypeptide of an amino acid sequence of SEQ ID NO: 396 and a light chain with an amino acid sequence of SEQ ID NO: 369; or the antigen-binding fragment comprises a heavy chain with an amino acid sequence of SEQ ID NO: 370 and optionally an Fc polypeptide of an amino acid sequence of SEQ ID NO: 397 and a light chain with an amino acid sequence of SEQ ID NO: 371.

[0308] 223. The pharmaceutical composition of paragraph 222, wherein the transgene comprises a nucleotide sequence of SEQ ID NO: 384 encoding the heavy chain and a nucleotide sequence of SEQ ID NO: 385 encoding the light chain; or the transgene comprises a nucleotide sequence of SEQ ID NO: 386 encoding the heavy chain and a nucleotide sequence of SEQ ID NO: 387 encoding the light chain.

[0309] 224. The pharmaceutical composition of any of paragraphs 219 to 221, wherein the antibody or antigen-binding fragment thereof is a hyperglycosylated mutant.

[0310] 225. The pharmaceutical composition of any of paragraphs 219 to 224, wherein the transgene encodes a signal sequence at the N-terminus of the heavy chain and the light chain of said antigen-binding fragment that directs secretion and post translational modification in said human liver cells or human muscle cells.

[0311] 226. The pharmaceutical composition of paragraph 225, wherein said signal sequence is selected from the signal sequences in Table 2 or 3.

[0312] 227. The pharmaceutical composition of any of paragraphs 219 to 226, wherein the AAV capsid is AAV8.

[0313] 228. A pharmaceutical composition for treating eosinophilic asthma in a human subject in need thereof, comprising an AAV vector comprising:
[0314] (a) a viral capsid that is at least 95% identical to the amino acid sequence of an AAV8 capsid (SEQ ID NO: 143), an AAV9 capsid (SEQ ID NO: 144), or an AAVrh10 capsid (SEQ ID NO: 145); and
[0315] (b) an artificial genome comprising an expression cassette flanked by AAV ITRs wherein the expression cassette comprises a transgene encoding an anti-IL5R mAb or anti-IgE mAb, or an antigen-binding fragment thereof, operably linked to one or more regulatory sequences that control expression of the transgene in human liver cells or human muscle cells;
[0316] wherein said AAV vector is formulated for intravenous administration to the liver or muscle of said subject.

[0317] 229. The pharmaceutical composition of paragraph 228 wherein the anti-IL5R or anti-IgE mAb is reslizumab or omalizumab.

[0318] 230. The pharmaceutical composition of paragraphs 228 or 229, wherein the antigen-binding fragment is a Fab, a F(ab′)₂, or an scFv.

[0319] 231. The pharmaceutical composition of any of paragraphs 228 to 230, wherein the antigen-binding fragment comprises a heavy chain with an amino acid sequence of SEQ ID NO: 364 and optionally an Fc polypeptide of an amino acid sequence of SEQ ID NO: 394 and a light chain with an amino acid sequence of SEQ ID NO: 365; or a heavy chain with an amino acid sequence of SEQ ID NO: 372 and optionally an Fc polypeptide of an amino acid sequence of SEQ ID NO: 398 and a light chain with an amino acid sequence of SEQ ID NO: 373.

[0320] 232. The pharmaceutical composition of paragraph 231, wherein the transgene comprises a nucleotide sequence of SEQ ID NO: 380 encoding the heavy chain and a nucleotide sequence of SEQ ID NO: 381 encoding the light chain; or a nucleotide sequence of SEQ ID NO: 388 encoding the heavy chain and a nucleotide sequence of SEQ ID NO: 389 encoding the light chain.

[0321] 233. The pharmaceutical composition of any of paragraphs 228 to 231, wherein the antibody or antigen-binding fragment thereof is a hyperglycosylated mutant.

[0322] 234. The pharmaceutical composition of any of paragraphs 228 to 233, wherein the transgene encodes a signal sequence at the N-terminus of the heavy chain and the light chain of said antigen-binding fragment that directs secretion and post translational modification in said human liver cells or human muscle cells.

[0323] 235. The pharmaceutical composition of paragraph 234, wherein said signal sequence is selected from the signal sequences in Table 2 or 3.

[0324] 236. The pharmaceutical composition of any of paragraphs 228 to 235, wherein the AAV capsid is AAV8.

[0325] 237. A pharmaceutical composition for treating asthma or chronic obstructive pulmonary disease (COPD) in a human subject in need thereof, comprising an AAV vector comprising:
[0326] (a) a viral capsid that is at least 95% identical to the amino acid sequence of an AAV8 capsid (SEQ ID NO: 143), an AAV9 capsid (SEQ ID NO: 144), or an AAVrh10 capsid (SEQ ID NO: 145); and
[0327] (b) an artificial genome comprising an expression cassette flanked by AAV ITRs wherein the expression cassette comprises a transgene encoding an anti-IL5, anti-IL-5R, anti-IgE, or anti-TSLP mAb, or an antigen-binding fragment thereof, operably linked to one or more regulatory sequences that control expression of the transgene in human liver cells or human muscle cells;
[0328] wherein said AAV vector is formulated for intravenous administration to the liver or muscle of said subject.

[0329] 238. The pharmaceutical composition of paragraph 237 wherein the anti-IL-5, anti-IL5R, anti-IgE, or anti-TSLP mAb is benralizumab, reslizumab, omalizumab, or tezepelumab.

[0330] 239. The pharmaceutical composition of paragraphs 237 or 238, wherein the antigen-binding fragment is a Fab, a F(ab′)₂, or an scFv.

[0331] 240. The pharmaceutical composition of any of paragraphs 237 to 239, wherein the antigen-binding fragment comprises a heavy chain with an amino acid sequence of SEQ ID NO: 364 and optionally an Fc polypeptide of an amino acid sequence of SEQ ID NO: 394 and a light chain with an amino acid sequence of SEQ ID NO: 365; a heavy chain with an amino acid sequence of SEQ ID NO: 366 and optionally an Fc polypeptide of an amino acid sequence of SEQ ID NO: 395 and a light chain with an amino acid sequence of SEQ ID NO: 367; a heavy chain with an amino acid sequence of SEQ ID NO: 372 and a light chain with an amino acid sequence of SEQ ID NO: 373; or a heavy chain with an amino acid sequence of SEQ ID NO: 374 and optionally an IgG2 Fc polypeptide of an amino acid sequence of SEQ ID NO: 284 and a light chain with an amino acid sequence of SEQ ID NO: 375

[0332] 241. The pharmaceutical composition of paragraph 240, wherein the transgene comprises a nucleotide sequence of SEQ ID NO: 380 encoding the heavy chain and a nucleotide sequence of SEQ ID NO: 381 encoding the light chain; a nucleotide sequence of SEQ ID NO: 382 encoding the heavy chain and a nucleotide sequence of SEQ ID NO: 383 encoding the light chain; a nucleotide sequence of SEQ ID NO: 388 encoding the heavy chain and a nucleotide sequence of SEQ ID NO: 389 encoding the light chain; a nucleotide sequence of SEQ ID NO: 390 encoding the heavy chain and a nucleotide sequence of SEQ ID NO: 391 encoding the light chain.

[0333] 242. The pharmaceutical composition of any of paragraphs 237 to 240, wherein the antibody or antigen-binding fragment thereof is a hyperglycosylated mutant.

[0334] 243. The pharmaceutical composition of any of paragraphs 237 to 242, wherein the transgene encodes a signal sequence at the N-terminus of the heavy chain and the light chain of said antigen-binding fragment that directs secretion and post translational modification in said human liver cells or human muscle cells.

[0335] 244. The pharmaceutical composition of paragraph 243, wherein said signal sequence is selected from the signal sequences in Table 2 or 3.

[0336] 245. The pharmaceutical composition of any of paragraphs 237 to 244, wherein the AAV capsid is AAV8.

[0337] 246. A pharmaceutical composition for treating chronic idiopathic urticaria in a human subject in need thereof, comprising an AAV vector comprising:
[0338] (a) a viral capsid that is at least 95% identical to the amino acid sequence of an AAV8 capsid (SEQ ID NO:143), an AAV9 capsid (SEQ ID NO: 144), or an AAVrh10 capsid (SEQ ID NO: 145); and
[0339] (b) an artificial genome comprising an expression cassette flanked by AAV ITRs wherein the expression cassette comprises a transgene encoding an anti-IgE mAb, or an antigen-binding fragment thereof, operably linked to one or more regulatory sequences that control expression of the transgene in human liver cells or human muscle cells;
[0340] wherein said AAV vector is formulated for intravenous administration to the liver or muscle of said subject.

[0341] 247. The pharmaceutical composition of paragraph 246, wherein the anti-IgE mAb is omalizumab.

[0342] 248. The pharmaceutical composition of paragraphs 246 or 247, wherein the antigen-binding fragment is a Fab, a F(ab′)₂, or an scFv.

[0343] 249. The pharmaceutical composition of any of paragraphs 246 to 248, wherein the antigen-binding fragment comprises a heavy chain with an amino acid sequence of SEQ ID NO: 372 and optionally an Fc polypeptide of an amino acid sequence of SEQ ID NO: 398 and a light chain with an amino acid sequence of SEQ ID NO: 373.

[0344] 250. The pharmaceutical composition of paragraph 249, wherein the transgene comprises a nucleotide sequence of SEQ ID NO: 388 encoding the heavy chain and a nucleotide sequence of SEQ ID NO: 389 encoding the light chain.

[0345] 251. The pharmaceutical composition of any of paragraphs 246 to 249, wherein the antibody or antigen-binding fragment thereof is a hyperglycosylated mutant.

[0346] 252. The pharmaceutical composition of any of paragraphs 246 to 251, wherein the transgene encodes a signal sequence at the N-terminus of the heavy chain and the light chain of said antigen-binding fragment that directs secretion and post translational modification in said human liver cells or human muscle cells.

[0347] 253. The pharmaceutical composition of paragraph 252, wherein said signal sequence is selected from the signal sequences in Table 2 or 3.

The pharmaceutical composition of any of paragraphs 246 to 253, wherein the AAV capsid is AAV8.

### Method of Treatment

[0348] 254. A method of treating atopic dermatitis in a human subject in need thereof, comprising delivering to the circulation of said human subject, a therapeutically effective amount of an anti-IL13 or anti-IL31RA mAb or antigen-binding fragment thereof, produced by human liver cells or human muscle cells.

[0349] 255. A method of treating atopic dermatitis in a human subject in need thereof, comprising:
[0350] administering to the liver or muscle of said subject a therapeutically effective amount of a recombinant nucleotide expression vector comprising a transgene encoding an anti-IL13 or anti-IL31RA mAb, or an antigen-binding fragment thereof, operably linked to one or more regulatory sequences that control expression of the transgene in human liver cells or human muscle cells, so that a depot is formed that releases a HuPTM form of said mAb or antigen-binding fragment thereof.

[0351] 256. The method of paragraph 254 or 255 wherein the anti-IL13 or anti-IL31RA mAb is tralokinumab or nemolizumab.

[0352] 257. The method of any of paragraphs 254 to 256 wherein the antigen-binding fragment is a Fab, a F(ab′)₂, or an scFv.

[0353] 258. The method of any of paragraphs 254 to 257, wherein the antigen-binding fragment comprises a heavy chain with an amino acid sequence of SEQ ID NO: 368 and optionally an Fc polypeptide of an amino acid sequence of SEQ ID NO: 396 and a light chain with an amino acid sequence of SEQ ID NO: 369; or a heavy chain with an amino acid sequence of SEQ ID NO: 370 and optionally an Fc polypeptide of an amino acid sequence of SEQ ID NO: 397 and a light chain with an amino acid sequence of SEQ ID NO: 371.

[0354] 259. The method of claim 258, wherein the transgene comprises a nucleotide sequence of SEQ ID NO: 384 encoding the heavy chain and a nucleotide sequence of SEQ ID NO: 385 encoding the light chain; or a nucleotide sequence of SEQ ID NO: 386 encoding the heavy chain and a nucleotide sequence of SEQ ID NO: 387 encoding the light chain.

[0355] 260. The method of any of paragraphs 254 to 258, wherein the mAb or antigen-binding fragment thereof is a hyperglycosylated mutant.

[0356] 261. The method of any of paragraphs 254 to 260 wherein the mAb or antigen-binding fragment thereof contains an alpha 2,6-sialylated glycan.

[0357] 262. The method of any of paragraphs 254 to 261 wherein the mAb or antigen-binding fragment thereof is glycosylated but does not contain detectable NeuGc or α-Gal.

[0358] 263. The method of any of paragraphs 254 to 262 wherein the mAb or antigen-binding fragment thereof contains a tyrosine sulfation.

[0359] 264. The method of any of paragraphs 254 to 263 wherein the recombinant expression vector is AAV8 or AAV9.

[0360] 265. The method of any of paragraphs 254 to 264 in which production of said HuPTM form of the mAb or antigen-binding fragment thereof is confirmed by transducing human liver cells or muscle cells in culture with said recombinant nucleotide expression vector and expressing said mAb or antigen-binding fragment thereof.

[0361] 266. A method of treating eosinophilic asthma in a human subject in need thereof, comprising delivering to the circulation of said human subject, a therapeutically effective amount of an anti-IL5R or anti-IgE mAb or antigen-binding fragment thereof, produced by human liver cells or human muscle cells.

[0362] 267. A method of treating eosinophilic asthma in a human subject in need thereof, comprising:
[0363] administering to the liver or muscle of said subject a therapeutically effective amount of a recombinant nucleotide expression vector comprising a transgene encoding an anti-IL5R or anti-IgE mAb, or an antigen-binding fragment thereof, operably linked to one or more regulatory sequences that control expression of the transgene in human liver cells or human muscle cells, so that a depot is formed that releases a HuPTM form of said mAb or antigen-binding fragment thereof.

[0364] 268. The method of paragraph 266 or 267 wherein the anti-IL5R or anti-IgE mAb is reslizumab or omalizumab.

[0365] 269. The method of any of paragraphs 266 to 268 wherein the antigen-binding fragment is a Fab, a F(ab′)₂, or an scFv.

[0366] 270. The method of any of paragraphs 266 to 269, wherein the antigen-binding fragment comprises a heavy chain with an amino acid sequence of SEQ ID NO: 366 and optionally an Fc polypeptide of an amino acid sequence of SEQ ID NO: 395 and a light chain with an amino acid sequence of SEQ ID NO: 367; or a heavy chain with an amino acid sequence of SEQ ID NO: 372 and optionally an Fc polypeptide of an amino acid sequence of SEQ ID NO: 398 and a light chain with an amino acid sequence of SEQ ID NO: 373.

[0367] 271. The method of claim 270, wherein the transgene comprises a nucleotide sequence of SEQ ID NO: 382 encoding the heavy chain and a nucleotide sequence of SEQ ID NO: 383 encoding the light chain; or a nucleotide sequence of SEQ ID NO: 388 encoding the heavy chain and a nucleotide sequence of SEQ ID NO: 389 encoding the light chain.

[0368] 272. The method of any of paragraphs 266 to 270, wherein the mAb or antigen-binding fragment thereof is a hyperglycosylated mutant.

[0369] 273. The method of any of paragraphs 266 to 272 wherein the mAb or antigen-binding fragment thereof contains an alpha 2,6-sialylated glycan.

[0370] 274. The method of any of paragraphs 266 to 273 wherein the mAb or antigen-binding fragment thereof is glycosylated but does not contain detectable NeuGc or α-Gal.

[0371] 275. The method of any of paragraphs 266 to 274 wherein the mAb or antigen-binding fragment thereof contains a tyrosine sulfation.

[0372] 276. The method of any of paragraphs 266 to 275 wherein the recombinant expression vector is AAV8 or AAV9.

[0373] 277. The method of any of paragraphs 266 to 276 in which production of said HuPTM form of the mAb or antigen-binding fragment thereof is confirmed by transducing human liver cells or muscle cells in culture with said recombinant nucleotide expression vector and expressing said mAb or antigen-binding fragment thereof.

[0374] 278. A method of treating asthma or COPD in a human subject in need thereof, comprising delivering to the circulation of said human subject, a therapeutically effective amount of an anti-IL5, anti-IL5R, anti-IgE, or anti-TSLP mAb or antigen-binding fragment thereof, produced by human liver cells or human muscle cells.

[0375] 279. A method of treating eosinophilic asthma in a human subject in need thereof, comprising:
[0376] administering to the liver or muscle of said subject a therapeutically effective amount of a recombinant nucleotide expression vector comprising a transgene encoding an anti-IL5R, anti-IL5, anti-IgE, or anti-TSLP mAb, or an antigen-binding fragment thereof, operably linked to one or more regulatory sequences that control expression of the transgene in human liver cells or human muscle cells, so that a depot is formed that releases a HuPTM form of said mAb or antigen-binding fragment thereof.

[0377] 280. The method of paragraph 278 or 279 wherein the anti-IL5R, anti-IL5, anti-IgE, or anti-TSLP mAb is benralizumab, reslizumab, omalizumab, or tezepelumab.

[0378] 281. The method of any of paragraphs 278 to 280 wherein the antigen-binding fragment is a Fab, a F(ab′)₂, or an scFv.

[0379] 282. The method of any of paragraphs 278 to 281, wherein the antigen-binding fragment comprises a heavy chain with an amino acid sequence of SEQ ID NO: 364 and optionally an Fc polypeptide of an amino acid sequence of SEQ ID NO: 394 and a light chain with an amino acid sequence of SEQ ID NO: 365; or a heavy chain with an amino acid sequence of SEQ ID NO: 366 and optionally an Fc polypeptide of an amino acid sequence of SEQ ID NO: 395 and a light chain with an amino acid sequence of SEQ ID NO: 367; or a heavy chain with an amino acid sequence of SEQ ID NO: 372 and optionally an Fc polypeptide of an amino acid sequence of SEQ ID NO: 398 and a light chain with an amino acid sequence of SEQ ID NO: 373; or a heavy chain with an amino acid sequence of SEQ ID NO: 374 and optionally an IgG2 Fc polypeptide of an amino acid sequence of SEQ ID NO: 284 and a light chain with an amino acid sequence of SEQ ID NO: 375.

[0380] 283. The method of paragraph 282, wherein the transgene comprises a nucleotide sequence of SEQ ID NO: 380 encoding the heavy chain and a nucleotide sequence of SEQ ID NO: 381 encoding the light chain; or a nucleotide sequence of SEQ ID NO: 383 encoding the heavy chain and a nucleotide sequence of SEQ ID NO: 383 encoding the light chain; or a nucleotide sequence of SEQ ID NO: 388 encoding the heavy chain and a nucleotide sequence of SEQ ID NO: 389 encoding the light chain; or a nucleotide sequence of SEQ ID NO: 390 encoding the heavy chain and a nucleotide sequence of SEQ ID NO: 391 encoding the light chain.

[0381] 284. The method of any of paragraphs 278 to 283, wherein the mAb or antigen-binding fragment thereof is a hyperglycosylated mutant.

[0382] 285. The method of any of paragraphs 278 to 284 wherein the mAb or antigen-binding fragment thereof contains an alpha 2,6-sialylated glycan.

[0383] 286. The method of any of paragraphs 278 to 285 wherein the mAb or antigen-binding fragment thereof is glycosylated but does not contain detectable NeuGc or α-Gal.

[0384] 287. The method of any of paragraphs 278 to 286 wherein the mAb or antigen-binding fragment thereof contains a tyrosine sulfation.

[0385] 288. The method of any of paragraphs 278 to 287 wherein the recombinant expression vector is AAV8 or AAV9.

[0386] 289. The method of any of paragraphs 278 to 288 in which production of said HuPTM form of the mAb or antigen-binding fragment thereof is confirmed by transducing human liver cells or muscle cells in culture with said recombinant nucleotide expression vector and expressing said mAb or antigen-binding fragment thereof.

[0387] 290. A method of treating chronic idiopathic urticaria in a human subject in need thereof, comprising delivering to the circulation of said human subject, a therapeutically effective amount of an anti-IgE mAb or antigen-binding fragment thereof, produced by human liver cells or human muscle cells.

[0388] 291. A method of treating eosinophilic asthma in a human subject in need thereof, comprising:
[0389] administering to the liver or muscle of said subject a therapeutically effective amount of a recombinant nucleotide expression vector comprising a transgene encoding an anti-IgE mAb, or an antigen-binding fragment thereof, operably linked to one or more regulatory sequences that control expression of the transgene in human liver cells or human muscle cells, so that a depot is formed that releases a HuPTM form of said mAb or antigen-binding fragment thereof.

[0390] 292. The method of paragraph 290 or 291 wherein the anti-IgE mAb is omalizumab.

[0391] 293. The method of any of paragraphs 290 to 292 wherein the antigen-binding fragment is a Fab, a F(ab′)₂, or an scFv.

[0392] 294. The method of any of paragraphs 290 to 293, wherein the antigen-binding fragment comprises a heavy chain with an amino acid sequence of SEQ ID NO: 372 and optionally an Fc polypeptide of an amino acid sequence of SEQ ID NO: 398 and a light chain with an amino acid sequence of SEQ ID NO: 373.

[0393] 295. The method of paragraph 294, wherein the transgene comprises a nucleotide sequence of SEQ ID NO: 388 encoding the heavy chain and a nucleotide sequence of SEQ ID NO: 389 encoding the light chain.

[0394] 296. The method of any of paragraphs 290 to 295, wherein the mAb or antigen-binding fragment thereof is a hyperglycosylated mutant.

[0395] 297. The method of any of paragraphs 290 to 296 wherein the mAb or antigen-binding fragment thereof contains an alpha 2,6-sialylated glycan.

[0396] 298. The method of any of paragraphs 290 to 297 wherein the mAb or antigen-binding fragment thereof is glycosylated but does not contain detectable NeuGc or α-Gal.

[0397] 299. The method of any of paragraphs 290 to 298 wherein the mAb or antigen-binding fragment thereof contains a tyrosine sulfation.

[0398] 300. The method of any of paragraphs 290 to 299 wherein the recombinant expression vector is AAV8 or AAV9.

[0399] 301. The method of any of paragraphs 290 to 300 in which production of said HuPTM form of the mAb or antigen-binding fragment thereof is confirmed by transducing human liver cells or muscle cells in culture with said recombinant nucleotide expression vector and expressing said mAb or antigen-binding fragment thereof.

### Method of Manufacture

[0400] 302. The method of paragraph 211, wherein the transgene encodes a substantially full-length or full-length mAb or antigen binding fragment that comprises the heavy and light chain variable domains of benralizumab, reslizumab, tralokinumab, nemolizumab, omalizumab, or tezepelumab.

[0401] 303. The method of paragraph 302, wherein the AAV capsid protein is an AAV8, AAV9, or AAVrh10 capsid protein.

### Myasthenia Gravis

[0402] Compositions of Matter

[0403] 304. A pharmaceutical composition for treating myasthenia gravis in a human subject in need thereof, comprising an AAV vector comprising:
[0404] (a) a viral capsid that is at least 95% identical to the amino acid sequence of an AAV8 capsid (SEQ ID NO: 143), an AAV9 capsid (SEQ ID NO: 144), or an AAVrh10 capsid (SEQ ID NO: 145); and
[0405] (b) an artificial genome comprising an expression cassette flanked by AAV ITRs wherein the expression cassette comprises a transgene encoding an anti-C5 mAb, or an antigen-binding fragment thereof, operably linked to one or more regulatory sequences that control expression of the transgene in human liver cells or human muscle cells;
[0406] wherein said AAV vector is formulated for intravenous administration to the liver or muscle of said subject.

[0407] 305. The pharmaceutical composition of paragraph 304 wherein the anti-C5 is ravulizumab.

[0408] 306. The pharmaceutical composition of paragraphs 304 or 305, wherein the antigen-binding fragment is a Fab, a F(ab′)₂, or an scFv.

[0409] 307. The pharmaceutical composition of any of paragraphs 304 to 306, wherein the antigen-binding fragment comprises a heavy chain with an amino acid sequence of SEQ ID NO: 362 and optionally an Fc polypeptide of an amino acid sequence of SEQ ID NO: 393 and a light chain with an amino acid sequence of SEQ ID NO: 363.

[0410] 308. The pharmaceutical composition of paragraph 307, wherein the transgene comprises a nucleotide sequence of SEQ ID NO: 378 encoding the heavy chain and a nucleotide sequence of SEQ ID NO: 379 encoding the light chain.

[0411] 309. The pharmaceutical composition of any of paragraphs 304 to 308, wherein the antibody or antigen-binding fragment thereof is a hyperglycosylated mutant.

[0412] 310. The pharmaceutical composition of any of paragraphs 304 to 310, wherein the transgene encodes a signal sequence at the N-terminus of the heavy chain and the light chain of said antigen-binding fragment that directs secretion and post translational modification in said human liver cells or human muscle cells.

[0413] 311. The pharmaceutical composition of paragraph 310, wherein said signal sequence is selected from the signal sequences in Table 2 or 3.

[0414] 312. The pharmaceutical composition of any of paragraphs 304 to 311, wherein the AAV capsid is AAV8.

### Method of Treatment

[0415] 313. A method of treating myasthenia gravis in a human subject in need thereof, comprising delivering to the circulation of said human subject, a therapeutically effective amount of an anti-C5 mAb or antigen-binding fragment thereof, produced by human liver cells or human muscle cells.

[0416] 314. A method of treating myasthenia gravis in a human subject in need thereof, comprising:
[0417] administering to the liver or muscle of said subject a therapeutically effective amount of a recombinant nucleotide expression vector comprising a transgene encoding an anti-C5 mAb, or an antigen-binding fragment thereof, operably linked to one or more regulatory sequences that control expression of the transgene in human liver cells or human muscle cells, so that a depot is formed that releases a HuPTM form of said mAb or antigen-binding fragment thereof.

[0418] 315. The method of paragraph 313 or 314 wherein the anti-C5 is ravulizumab.

[0419] 316. The method of any of paragraphs 313 to 315 wherein the antigen-binding fragment is a Fab, a F(ab′)₂, or an scFv.

[0420] 317. The method of any of paragraphs 313 to 316, wherein the antigen-binding fragment comprises a heavy chain with an amino acid sequence of SEQ ID NO: 362 and optionally an Fc polypeptide of an amino acid sequence of SEQ ID NO: 393 and a light chain with an amino acid sequence of SEQ ID NO: 363.

[0421] 318. The method of claim 260, wherein the transgene comprises a nucleotide sequence of SEQ ID NO: 378 encoding the heavy chain and a nucleotide sequence of SEQ ID NO: 379 encoding the light chain.

[0422] 319. The method of any of paragraphs 313 to 318, wherein the mAb or antigen-binding fragment thereof is a hyperglycosylated mutant.

[0423] 320. The method of any of paragraphs 313 to 319 wherein the mAb or antigen-binding fragment thereof contains an alpha 2,6-sialylated glycan.

[0424] 321. The method of any of paragraphs 313 to 320 wherein the mAb or antigen-binding fragment thereof is glycosylated but does not contain detectable NeuGc or α-Gal.

[0425] 322. The method of any of paragraphs 313 to 321 wherein the mAb or antigen-binding fragment thereof contains a tyrosine sulfation.

[0426] 323. The method of any of paragraphs 313 to 322 wherein the recombinant expression vector is AAV8 or AAV9.

[0427] 324. The method of any of paragraphs 313 to 323 in which production of said HuPTM form of the mAb or antigen-binding fragment thereof is confirmed by transducing human liver cells or muscle cells in culture with said recombinant nucleotide expression vector and expressing said mAb or antigen-binding fragment thereof.

### Method of Manufacture

[0428] 325. The method of paragraph 211, wherein the transgene encodes a substantially full-length or full-length mAb or antigen binding fragment that comprises the heavy and light chain variable domains of ravulizumab.

[0429] 326. The method of paragraph 304, wherein the AAV capsid protein is an AAV8, AAV9, or AAVrh10 capsid protein.

### Compositions and Methods for Inhibiting Immune Response

[0430] 327. A pharmaceutical composition for reducing, inhibiting or ameliorating a detrimental immune response in a human subject in need thereof, comprising an AAV vector comprising:
[0431] (a) a viral capsid that is at least 95% identical to the amino acid sequence of an AAV8 capsid (SEQ ID NO: 143), an AAV9 capsid (SEQ ID NO: 144), an AAVrh10 capsid (SEQ ID NO: 145); and
[0432] (b) an artificial genome comprising an expression cassette flanked by AAV ITRs wherein the expression cassette comprises a transgene encoding a substantially full-length or full-length mAb of an anti-interleukin-6 receptor (anti-IL6R) or anti-interleukin-6 (IL6), or an antigen-binding fragment thereof, operably linked to one or more regulatory sequences that control expression of the transgene in human liver cells or muscle cells;
[0433] wherein said AAV vector is formulated for subcutaneous, intramuscular, intravenous or pulmonary administration to the subject.

[0434] 328. The pharmaceutical composition of paragraph 327, wherein the anti-IL6R mAb is satralizumab, sarilumab, or tocilizumab, or the anti-IL6 mAb is siltuximab, clazakizumab, sirukumab, olokizumab, or gerilimzumab.

[0435] 329. The pharmaceutical composition of paragraphs 327 or 328, wherein the antigen-binding fragment is a Fab, a F(ab′)₂, or an scFv.

[0436] 330. The pharmaceutical composition of any of paragraphs 327 to 329, wherein the full-length mAb or the antigen-binding fragment comprises a heavy chain with an amino acid sequence of SEQ ID NO: 59 and optionally an Fc polypeptide with an amino acid sequence of SEQ ID NO: 309 and a light chain with an amino acid sequence of SEQ ID NO: 60; or a heavy chain with an amino acid sequence of SEQ ID NO: 61 and optionally an Fc polypeptide with an amino acid sequence of SEQ ID NO: 310 and a light chain with an amino acid sequence of SEQ ID NO: 62; or a heavy chain with an amino acid sequence of SEQ ID NO: 331 and optionally an Fc polypeptide with an amino acid sequence of SEQ ID NO: 355 and a light chain with an amino acid sequence of SEQ ID NO: 332; or a heavy chain with an amino acid sequence of SEQ ID NO: 333 and optionally an Fc polypeptide with an amino acid sequence of SEQ ID NO: 356 and a light chain with an amino acid sequence of SEQ ID NO: 334; or a heavy chain with an amino acid sequence of SEQ ID NO: 335 and optionally an Fc polypeptide with an amino acid sequence of SEQ ID NO: 357 and a light chain with an amino acid sequence of SEQ ID NO: 336; or a heavy chain with an amino acid sequence of SEQ ID NO: 337 and optionally an Fc polypeptide with an amino acid sequence of SEQ ID NO: 358 and a light chain with an amino acid sequence of SEQ ID NO: 338; or a heavy chain with an amino acid sequence of SEQ ID NO: 339 and optionally an Fc polypeptide with an amino acid sequence of SEQ ID NO: 283 and a light chain with an amino acid sequence of SEQ ID NO: 340; or a heavy chain with an amino acid sequence of SEQ ID NO: 341 and optionally an Fc polypeptide with an amino acid sequence of SEQ ID NO: 359 and a light chain with an amino acid sequence of SEQ ID NO: 342.

[0437] 331. The pharmaceutical composition of paragraph 330, wherein the transgene comprises a nucleotide sequence of SEQ ID NO: 129 encoding the heavy chain and a nucleotide sequence of SEQ ID NO: 130 encoding the light chain; or a nucleotide sequence of SEQ ID NO: 131 encoding the heavy chain and a nucleotide sequence of SEQ ID NO: 132 encoding the light chain; or a nucleotide sequence of SEQ ID NO: 343 encoding the heavy chain and a nucleotide sequence of SEQ ID NO: 344 encoding the light chain; or a nucleotide sequence of SEQ ID NO: 345 encoding the heavy chain and a nucleotide sequence of SEQ ID NO: 346 encoding the light chain; or a nucleotide sequence of SEQ ID NO: 347 encoding the heavy chain and a nucleotide sequence of SEQ ID NO: 348 encoding the light chain; or a nucleotide sequence of SEQ ID NO: 349 encoding the heavy chain and a nucleotide sequence of SEQ ID NO: 350 encoding the light chain; or a nucleotide sequence of SEQ ID NO: 351 encoding the heavy chain and a nucleotide sequence of SEQ ID NO: 352 encoding the light chain; or a nucleotide sequence of SEQ ID NO: 353 encoding the heavy chain and a nucleotide sequence of SEQ ID NO: 354 encoding the light chain.

[0438] 332. The pharmaceutical composition of any of paragraphs 327 to 331, wherein the mAb or antigen-binding fragment thereof is a hyperglycosylated mutant or wherein the Fc polypeptide of the mAb is glycosylated or aglycosylated.

[0439] 333. The pharmaceutical composition of any of paragraphs 327 to 331, wherein the transgene encodes a signal sequence at the N-terminus of the heavy chain and the light chain of said antigen-binding fragment that directs secretion and post translational modification in said human liver cells or human muscle cells.

[0440] 334. The pharmaceutical composition of paragraph 333, wherein said signal sequence is MYRMQLLLLIALSLALVTNS (SEQ ID NO: 146) or a signal sequence from Table 3 or Table 4.

[0441] 335. The pharmaceutical composition of any of paragraphs 327 to 334, wherein the AAV capsid is AAV8.

[0442] 336. A method of reducing, inhibiting or ameliorating a detrimental immune response in a human subject in need thereof, comprising delivering to the circulation or tissue that is the target of the immune response of said human subject, a therapeutically effective amount of a substantially full-length or full-length mAb of an anti-interleukin-6 receptor (anti-IL6R) mAb, anti-interleukin-6 (IL6) mAb, or antigen-binding fragment thereof, expressed from a transgene and produced by human muscle or liver cells.

[0443] 337. A method reducing, inhibiting or ameliorating a detrimental immune response in a human subject in need thereof, comprising:
[0444] administering to the muscle or liver of said human subject a therapeutically effective amount of a recombinant nucleotide expression vector comprising a transgene encoding a substantially full-length or full-length mAb of an anti-interleukin-6 receptor (anti-IL6R) mAb, anti-interleukin-6 (IL6) mAb, or an antigen-binding fragment thereof, operably linked to one or more regulatory sequences that control expression of the transgene in human muscle or liver cells, so that a depot is formed that releases a HuPTM form of the mAb or antigen-binding fragment thereof.

[0445] 338. The method of paragraph 336 or 337 wherein the anti-IL6R is satralizumab, sarilumab, or tocilizumab, or the anti-IL6 mAb is siltuximab, clazakizumab, sirukumab, olokizumab, or gerilimzumab.

[0446] 339. The method of any of paragraphs 336 to 338 wherein the antigen-binding fragment is a Fab, a F(ab)₂, or an scFv.

[0447] 340. The method of any of paragraphs 336 to 339, wherein the full-length mAb or the antigen-binding fragment comprises a heavy chain with an amino acid sequence of SEQ ID NO: 59 and optionally an Fc polypeptide with an amino acid sequence of SEQ ID NO: 309 and a light chain with an amino acid sequence of SEQ ID NO: 60; or a heavy chain with an amino acid sequence of SEQ ID NO: 61 and optionally an Fc polypeptide with an amino acid sequence of SEQ ID NO: 310 and a light chain with an amino acid sequence of SEQ ID NO: 62; or a heavy chain with an amino acid sequence of SEQ ID NO: 341 and optionally an Fc polypeptide with an amino acid sequence of SEQ ID NO: 359 and a light chain with an amino acid sequence of SEQ ID NO: 342; or a heavy chain with an amino acid sequence of SEQ ID NO: 331 and optionally an Fc polypeptide with an amino acid sequence of SEQ ID NO: 355 and a light chain with an amino acid sequence of SEQ ID NO: 332; or a heavy chain with an amino acid sequence of SEQ ID NO: 333 and optionally an Fc polypeptide with an amino acid sequence of SEQ ID NO: 356 and a light chain with an amino acid sequence of SEQ ID NO: 334; or a heavy chain with an amino acid sequence of SEQ ID NO: 335 and optionally an Fc polypeptide with an amino acid sequence of SEQ ID NO: 357 and a light chain with an amino acid sequence of SEQ ID NO: 336; or a heavy chain with an amino acid sequence of SEQ ID NO: 337 and optionally an Fc polypeptide with an amino acid sequence of SEQ ID NO: 358 and a light chain with an amino acid sequence of SEQ ID NO: 338; or a heavy chain with an amino acid sequence of SEQ ID NO: 339 and optionally an Fc polypeptide with an IgG1 amino acid sequence of SEQ ID NO: 283 and a light chain with an amino acid sequence of SEQ ID NO: 340; or a heavy chain with an amino acid sequence of SEQ ID NO: 341 and optionally an Fc polypeptide with an amino acid sequence of SEQ ID NO: 359 and a light chain with an amino acid sequence of SEQ ID NO: 342.

[0448] 341. The method of paragraph 340, wherein the transgene comprises a nucleotide sequence of SEQ ID NO: 129 encoding the heavy chain and a nucleotide sequence of SEQ ID NO: 130 encoding the light chain; or a nucleotide sequence of SEQ ID NO: 131 encoding the heavy chain and a nucleotide sequence of SEQ ID NO: 132 encoding the light chain; or a nucleotide sequence of SEQ ID NO: 343 encoding the heavy chain and a nucleotide sequence of SEQ ID NO: 344 encoding the light chain; or a nucleotide sequence of SEQ ID NO: 345 encoding the heavy chain and a nucleotide sequence of SEQ ID NO: 346 encoding the light chain; or a nucleotide sequence of SEQ ID NO: 347 encoding the heavy chain and a nucleotide sequence of SEQ ID NO: 348 encoding the light chain; or a nucleotide sequence of SEQ ID NO: 349 encoding the heavy chain and a nucleotide sequence of SEQ ID NO: 350 encoding the light chain; or a nucleotide sequence of SEQ ID NO: 351 encoding the heavy chain and a nucleotide sequence of SEQ ID NO: 352 encoding the light chain; or a nucleotide sequence of SEQ ID NO: 353 encoding the heavy chain and a nucleotide sequence of SEQ ID NO: 354 encoding the light chain.

[0449] 342. The method of any of paragraphs 336 to 339, wherein the mAb or antigen-binding fragment thereof is a hyperglycosylated mutant or wherein the Fc polypeptide of the mAb is glycosylated or aglycosylated.

[0450] 343. The method of any of paragraphs 336 to 342 wherein the mAb or antigen-binding fragment thereof contains an alpha 2,6-sialylated glycan.

[0451] 344. The method of any of paragraphs 336 to 343 wherein the mAb or antigen-binding fragment thereof is glycosylated but does not contain detectable NeuGc or α-Gal.

[0452] 345. The method of any of paragraphs 336 to 344 wherein the mAb or antigen-binding fragment thereof contains a tyrosine sulfation.

[0453] 346. The method of any of paragraphs 336 to 345 wherein the recombinant expression vector is AAV8 or AAV9.

[0454] 347. The method of any of paragraphs 336 to 346 in which production of said HuPTM form of said mAb or antigen-binding fragment thereof is confirmed by transducing human liver or muscle cells in culture with said recombinant nucleotide expression vector and expressing said mAb or antigen-binding fragment thereof.

### AAV Encoding Full Length mAb Composition Embodiments

[0455] 348. A composition comprising an adeno-associated virus (AAV) vector having:
[0456] a. a viral AAV capsid, that is optionally at least 95% identical to the amino acid sequence of an AAV8 capsid (SEQ ID NO: 143), AAV9 capsid (SEQ ID NO: 144), AAVrh10 capsid (SEQ ID NO: 145), an AAVrh20 capsid, an AAVrh39 capsid or an AAVcy5 capsid; and
[0457] b. an artificial genome comprising an expression cassette flanked by AAV inverted terminal repeats (ITRs), wherein the expression cassette comprises a transgene encoding a substantially full-length or full-length mAb operably linked to one or more regulatory sequences that control expression of the transgene in human cells.
[0458] c. wherein the transgene encodes a signal sequence at the N-terminus of the heavy chain and the light chain of said mAb that directs secretion and post translational modification of said mAb.

[0459] 349. The composition of paragraph 348, wherein said mAb comprises a heavy chain with a Fc polypeptide and a light chain having any one of the sequence combinations specified in paragraphs 4, 13, 22, 31, 40, 49, 58, 67, 76, 85, 95, 107, 119, 131, 143, 155, 167, 179, 191, 203, 222, 231, 240, 249, 258, 270, 282, 294, 307, and 317.

[0460] 350. The composition of paragraph 348-349, wherein said mAb is a full length lanadelumab.

[0461] 351. The composition of paragraph 350, wherein the transgene comprises a Furin/T2A linker between the nucleotide sequences coding for the heavy and light chains of said mAb.

[0462] 352. The composition of paragraphs 350 to 351, wherein the regulatory sequence includes a regulatory sequence from Table 1.

[0463] 353. The composition of paragraph 352, wherein the regulator sequence is a LMTP6 promoter, an ApoE.hAAT regulatory sequence, a CAG promoter, a CK8 regulatory sequence, or a TBG promoter.

[0464] 354. The composition of paragraphs 350 to 353, wherein the transgene comprises a nucleotide sequence of SEQ ID NO. 141, 286, 287, or 435 to 444.

[0465] 355. The composition of paragraphs 350 to 354, wherein the viral capsid is and AAV8 viral capsid.

[0466] 356. A pharmaceutical composition for delivering lanadelumab to the bloodstream to treat hereditary angioedema in a human subject in need thereof, said composition comprising a recombinant AAV comprising a transgene encoding lanadelumab operably linked to one or more regulatory sequences that control expression of the transgene in muscle and/or liver cells, wherein said recombinant AAV is administered to said human subject at a dose sufficient to result in expression from the transgene and secretion of lanadelumab into the bloodstream of the human subject to produce lanadelumab plasma levels of at least 5 μg/ml to at least 35 μg/ml lanadelumab in said subject.

[0467] 357. A method of treating hereditary angioedema in a human subject in need thereof, comprising administering to the subject a dose of a composition comprising a recombinant AAV comprising a transgene encoding lanadelumab operably linked to one or more regulatory sequences that control expression of the transgene in muscle and/or liver cells, in an amount sufficient to result in expression from the transgene and secretion of lanadelumab into the bloodstream of the human subject to produce lanadelumab plasma levels of at least 5 μg/ml to at least 35 μg/ml lanadelumab in said subject.

[0468] 358. The method or composition of paragraphs 356 or 357 wherein the transgene comprises the nucleotide sequence of SEQ ID NO: 141, 286, 287, or 435 to 444

[0469] 359. The method or composition of paragraphs 356 to 358, wherein the lanadelumab plasma levels are 20 μg/ml to 35 μg/ml.

[0470] 360. The method or composition of paragraphs 356 to 359, wherein the lanadelumab plasma levels are maintained for at least three months.

[0471] 361. The method or composition of paragraphs 356 to 360 wherein the lanadelumab antibody secreted into the plasma exhibits greater a greater than at least 40%, 45%, 50%, 55%, 60%, 65% or 70 reduction in pKal activity as measured by a kinetic enzymatic functional assay.

[0472] 362. The method or composition of paragraph 361 wherein the activity of the lanadelumab antibody is measured at 2 weeks, 3 weeks, 4 weeks, 5 weeks, 6 weeks, 7 weeks, 8 weeks, 9 weeks, 10 weeks, 11 weeks or 12 weeks after said administration.

[0473] 363. A method of determining human anti-pKal antibody activity in a sample, said method comprising
[0474] a. Incubating the sample with activated human pKal;
[0475] b. Subsequently incubating the sample having been incubated with the activated human pKal with the synthetic substrate Pro-Phe-Arg-AMC
[0476] c. Measure the release of AMC over three hours as compared to a control sample.

### Additional Embodiments

[0477] 364. A pharmaceutical composition for delivery of an antibody or antigen binding fragment thereof to the bloodstream of a human subject in need thereof, comprising an AAV vector comprising:
[0478] (a) An AAV viral capsid that infects liver and/or muscle cells; and
[0479] (b) an artificial genome comprising an expression cassette flanked by AAV ITRs wherein the expression cassette comprises a transgene encoding a full-length antibody or an antigen-binding fragment thereof, operably linked to a chimeric promoter that directs expression in muscle and liver cells;
[0480] wherein said AAV vector is formulated for intramuscular administration.

[0481] 365. The pharmaceutical composition of paragraph 364 wherein the chimeric promoter is LMTP6 (SEQ ID NO: 320), LMTP13 (SEQ ID NO: 321), LMTP14 (SEQ ID NO: 322), LMTP15 (SEQ ID NO: 323), LMTP18 (SEQ ID NO: 324), LMTP19 (SEQ ID NO: 325), or LMTP20 (SEQ ID NO: 326).

[0482] 366. The pharmaceutical composition of paragraph 365 wherein the chimeric promoter is LMPT6 (SEQ ID NO: 320).

[0483] 367. The pharmaceutical composition of any one of paragraphs 364 to 366, wherein the AAV viral capsid is at least 95% identical to the amino acid sequence of an AAV8 capsid (SEQ ID NO: 143), an AAV9 capsid (SEQ ID NO: 144), an AAVrh10 capsid (SEQ ID NO: 145).

[0484] 368. The pharmaceutical composition of any of paragraphs 364 to 3673, wherein the antibody is sevacizumab, LKA-651, ravulizumab, adalimumab, infliximab, golimumab, elezanumab, NI-301, PRX-004, pamrevlumab, siltuximab, clazakizumab, sirukumab, olokizumab, gerilimzumab, satralizumab, sarilumab, tocilizumab, inebilizumab, etrolizumab, romosozumab, lanadelumab, benralizumab, reslizumab, tralokinumab, nemolizumab, omalizumab, or tezepelumab.

[0485] 369. The pharmaceutical composition of any of paragraphs 364 to 366, wherein the transgene comprises nucleotide sequence SEQ ID NO; 443.

### 4. BRIEF DESCRIPTION OF THE DRAWINGS

[0486] FIG. 1. A schematic of an rAAV vector genome construct containing an expression cassette encoding the heavy and light chains of the Fab region of a therapeutic mAb controlled by expression elements, flanked by the AAV ITRs.

[0487] FIGS. 2A-C. The amino acid sequence of a transgene construct for the Fab region of therapeutic antibodies to amyloid 13 peptides: solanezumab Fab (FIG. 2A), GSK933776 (FIG. 2B) and lecanemab (FIG. 2C). Glycosylation sites are boldface. Glutamine glycosylation sites; asparaginal (N) glycosylation sites, non-consensus asparaginal (N) glycosylation sites; and tyrosine-O-sulfation sites (italics) are as indicated in the legend. Complementarity-determining regions (CDR) are underscored. The heavy chain hinge regions are highlighted in grey.

[0488] FIG. 3. The amino acid sequence of a transgene construct for the Fab region of therapeutic antibodies to sortilin: AL-001 (FIG. 3). Glycosylation sites are boldface. Glutamine glycosylation sites; asparaginal (N) glycosylation sites, non-consensus asparaginal (N) glycosylation sites; and tyrosine-O-sulfation sites (italics) are as indicated in the legend. Complementarity-determining regions (CDR) are underscored. The heavy chain hinge regions are highlighted in grey.

[0489] FIGS. 4A-4C. The amino acid sequence of a transgene construct for the Fab region of therapeutic antibodies to tau: ABBV-8E12 (FIG. 4A), UCB-0107 (FIG. 4B), and NI-105 (FIG. 4C). Glycosylation sites are boldface. Glutamine glycosylation sites; asparaginal (N) glycosylation sites, non-consensus asparaginal (N) glycosylation sites; and tyrosine-O-sulfation sites (italics) are as indicated in the legend. Complementarity-determining regions (CDR) are underscored. The heavy chain hinge regions are highlighted in grey.

[0490] FIG. 5. The amino acid sequence of a transgene construct for the Fab region of therapeutic antibodies to SEMA4D: VX15/2503 (FIG. 5). Glycosylation sites are boldface. Glutamine glycosylation sites; asparaginal (N) glycosylation sites, non-consensus asparaginal (N) glycosylation sites; and tyrosine-O-sulfation sites (italics) are as indicated in the legend. Complementarity-determining regions (CDR) are underscored. The hinge regions are highlighted in grey.

[0491] FIGS. 6A-C. The amino acid sequence of a transgene construct for the Fab region of therapeutic antibodies to alpha-synuclein: prasinezumab (FIG. 6A), NI-202 (FIG. 6B), and MEDI-1341 (FIG. 6C). Glycosylation sites are boldface. Glutamine glycosylation sites; asparaginal (N) glycosylation sites, non-consensus asparaginal (N) glycosylation sites; and tyrosine-O-sulfation sites (italics) are as indicated in the legend. Complementarity-determining regions (CDR) are underscored. The hinge region is highlighted in grey.

[0492] FIGS. 7A and B. The amino acid sequence of a transgene construct for the Fab region of therapeutic antibodies to superoxide dismutase 1 (SOD1): NI-205.10D12 (FIG. 7A); and NI-205.12G7 (FIG. 7B). Glycosylation sites are boldface. Glutamine glycosylation sites; asparaginal (N) glycosylation sites, non-consensus asparaginal (N) glycosylation sites; and tyrosine-O-sulfation sites (italics) are as indicated in the legend. Complementarity-determining regions (CDR) are underscored. The hinge regions are highlighted in grey.

[0493] FIGS. 8A-C. The amino acid sequence of a transgene construct for the Fab region of therapeutic antibodies directed at CGRPR: eptinezumab (FIG. 8A), fremanezumab (FIG. 8B), and galcanezumab (FIG. 8C). Glycosylation sites are boldface. Glutamine glycosylation sites; asparaginal (N) glycosylation sites, non-consensus asparaginal (N) glycosylation sites; and tyrosine-O-sulfation sites (italics) are as indicated in the legend. Complementarity-determining regions (CDR) are underscored. The hinge regions are highlighted in grey.

[0494] FIGS. 9A-C. The amino acid sequence of a transgene construct for the Fab region of therapeutic antibody directed at biological factors: anti-VEGF, sevacizumab (FIG. 9A); anti-EpoR, LKA-651.NVS2 (FIG. 9B), and LKA-651.NVS3 (FIG. 9C). Glycosylation sites are boldface. Glutamine glycosylation sites; asparaginal (N) glycosylation sites, non-consensus asparaginal (N) glycosylation sites; and tyrosine-O-sulfation sites (italics) are as indicated in the legend. Complementarity-determining regions (CDR) are underscored. The hinge regions are highlighted in grey.

[0495] FIGS. 10A-D. The amino acid sequence of a transgene construct for the Fab region of therapeutic antibody directed at biological factors: anti-ALK1, ascrinvacumab (FIG. 10A); anti-C5, tesidolumab (FIG. 10B) and ravulizumab (FIG. 10D), and anti-endoglin, carotuximab (FIG. 10C). Glycosylation sites are boldface. Glutamine glycosylation sites; asparaginal (N) glycosylation sites, non-consensus asparaginal (N) glycosylation sites; and tyrosine-O-sulfation sites (italics) are as indicated in the legend. Complementarity-determining regions (CDR) are underscored. The heavy chain hinge regions are highlighted in grey.

[0496] FIG. 11. The amino acid sequence of a transgene construct for the Fab region of ANX-007, a therapeutic antibody to CC1Q. Glycosylation sites are boldface. Glutamine glycosylation sites; asparaginal (N) glycosylation sites, non-consensus asparaginal (N) glycosylation sites; and tyrosine-O-sulfation sites (italics) are as indicated in the legend. The hinge region is highlighted in grey.

[0497] FIGS. 12A-C. The amino acid sequence of a transgene construct for the Fab region of therapeutic antibody directed at TNF-alpha: adalimumab (FIG. 12A), infliximab (FIG. 12B), and golimumab (FIG. 12C). Glycosylation sites are boldface. Glutamine glycosylation sites; asparaginal (N) glycosylation sites, non-consensus asparaginal (N) glycosylation sites; and tyrosine-O-sulfation sites (italics) are as indicated in the legend. Complementarity-determining regions (CDR) are underscored. The heavy chain hinge regions are highlighted in grey.

[0498] FIG. 13. The amino acid sequence of a transgene construct for the Fab region of elezanumab, a therapeutic antibody to RGMa. Glycosylation sites are boldface. Glutamine glycosylation sites; asparaginal (N) glycosylation sites, non-consensus asparaginal (N) glycosylation sites; and tyrosine-O-sulfation sites (italics) are as indicated in the legend. Complementarity-determining regions (CDR) are underscored. The hinge region is highlighted in grey.

[0499] FIGS. 14A and B. The amino acid sequence of a transgene construct for the Fab region of therapeutic antibody directed at transthyretin (TTR): NI-301 (FIG. 14A) and PRX-004 (FIG. 14B). Glycosylation sites are boldface. Glutamine glycosylation sites; asparaginal (N) glycosylation sites, non-consensus asparaginal (N) glycosylation sites; and tyrosine-O-sulfation sites (italics) are as indicated in the legend. Complementarity-determining regions (CDR) are underscored. The hinge region is highlighted in grey.

[0500] FIG. 15. The amino acid sequence of a transgene construct for the Fab region of pamrevlumab, a therapeutic antibody to CTGF. Glycosylation sites are boldface. Glutamine glycosylation sites; asparaginal (N) glycosylation sites, non-consensus asparaginal (N) glycosylation sites; and tyrosine-O-sulfation sites (italics) are as indicated in the legend. Complementarity-determining regions (CDR) are underscored. The hinge region is highlighted in grey.

[0501] FIGS. 16A-I. The amino acid sequence of a transgene construct for the Fab region of therapeutic antibody directed at biological factors: anti-IL6R, satralizumab (FIG. 16A), sarilumab (FIG. 16B), tocilizumab (FIG. 16H); anti-IL6, siltuximab (FIG. 16C), clazakizumab (FIG. 16D), sirukumab (FIG. 16E), olokizumab (FIG. 16F), gerilimzumab (FIG. 16G), and anti-CD19, inebilizumab (FIG. 16I). Glycosylation sites are boldface. Glutamine glycosylation sites; asparaginal (N) glycosylation sites, non-consensus asparaginal (N) glycosylation sites; and tyrosine-O-sulfation sites (italics) are as indicated in the legend. Complementarity-determining regions (CDR) are underscored. The hinge region is highlighted in grey.

[0502] FIG. 17. The amino acid sequence of a transgene construct for the Fab region of etrolizumab, a therapeutic antibody to ITGB7. Glycosylation sites are boldface. Glutamine glycosylation sites; asparaginal (N) glycosylation sites, non-consensus asparaginal (N) glycosylation sites; and tyrosine-O-sulfation sites (italics) are as indicated in the legend. Complementarity-determining regions (CDR) are underscored. The hinge region is highlighted in grey.

[0503] FIG. 18. The amino acid sequence of a transgene construct for the Fab region of romosozumab, a therapeutic antibody to sclerostin. Glycosylation sites are boldface. Glutamine glycosylation sites; asparaginal (N) glycosylation sites, non-consensus asparaginal (N) glycosylation sites; and tyrosine-O-sulfation sites (italics) are as indicated in the legend. Complementarity-determining regions (CDR) are underscored. The hinge region is highlighted in grey.

[0504] FIG. 19. The amino acid sequence of a transgene construct for the Fab region of lanadelumab, a therapeutic antibody to plasma kallikrein (pKal). Glycosylation sites are boldface. Glutamine glycosylation sites; asparaginal (N) glycosylation sites, non-consensus asparaginal (N) glycosylation sites; and tyrosine-O-sulfation sites (italics) are as indicated in the legend. Complementarity-determining regions (CDR) are underscored. The hinge region is highlighted in grey.

[0505] FIGS. 20A and B. Amino acid sequence alignment of the amino acid sequences of the heavy (FIG. 20A) (residues 1-220 of SEQ ID NO: 1, residues 1-223 of SEQ ID NO: 3, residues 1-237 of SEQ ID NO: 5, residues 1-220 of SEQ ID NO: 7, residues 1-223 of SEQ ID NO: 9, residues 1-232 of SEQ ID NO: 11, residues 1-228 of SEQ ID NO: 13, residues 1-224 of SEQ ID NO: 15, residues 1-232 of SEQ ID NO: 17, residues 1-230 of SEQ ID NO: 19, residues 1-234 of SEQ ID NO: 21, residues 1-231 of SEQ ID NO: 23, residues 1-219 of SEQ ID NO: 25, residues 1-227 of SEQ ID NO: 27, residues 1-224 of SEQ ID NO: 29, residues 1-230 of SEQ ID NO: 31, residues 1-225 of SEQ ID NO: 33, residues 1-235 of SEQ ID NO: 35, residues 1-223 of SEQ ID NO: 37, residues 1-224 of SEQ ID NO: 39, residues 1-226 of SEQ ID NO: 41, residues 1-229 of SEQ ID NO: 43, residues 1-229 of SEQ ID NO: 45, residues 1-228 of SEQ ID NO: 47, residues 1-237 of SEQ ID NO: 49, residues 1-228 of SEQ ID NO: 51, residues 1-228 of SEQ ID NO: 53, residues 1-225 of SEQ ID NO: 55, residues 1-224 of SEQ ID NO: 57, residues 1-224 of SEQ ID NO: 59, residues 1-224 of SEQ ID NO: 61, residues 1-229 of SEQ ID NO: 63, residues 1-225 of SEQ ID NO: 65, residues 1-228 of SEQ ID NO: 67, residues 1-230 of SEQ ID NO: 69, residues 1-227 of SEQ ID NO: 331, residues 1-228 of SEQ ID NO: 333, residues 1-227 of SEQ ID NO: 335, residues 1-224 of SEQ ID NO: 337, residues 1-230 of SEQ ID NO: 339, residues 1-228 of SEQ ID NO: 341, residues 1-232 of SEQ ID NO: 360, residues 1-227 of SEQ ID NO: 362, residues 1-229 of SEQ ID NO: 364, residues 1-221 of SEQ ID NO: 366, residues 1-226 of SEQ ID NO: 368, residues 1-226 of SEQ ID NO: 370, residues 1-225 of SEQ ID NO: 372, and residues 1-227 of SEQ ID NO: 374, respectively, in order of appearance) and light (FIG. 20B) (SEQ ID NOs: 2, 4, 6, 8, 10, 12, 14, 16, 18, 20, 22, 24, 26, 28, 30, 32, 34, 36, 38, 40, 42, 44, 46, 48, 50, 52, 54, 56, 58, 60, 62, 64, 66, 68, 70, 332, 334, 336, 338, 340, 342, 361, 363, 365, 367, 369, 371, 373, and 375, respectively, in order of appearance) chain Fab portions of the therapeutic antibodies disclosed herein. Positions that may be substituted to produce hyperglycosylated variants of the Fab regions are highlighted. Four substitutions (one in the heavy chain and three in the light chain) that should result in hyperglycosylation of the Fab region by human cells are annotated above the amino acid residue positions. (For engineering mAbs or antigen-binding fragments to contain additional glycosylation sites on the Fab domain, see e.g., Courtois et al., 2016, mAbs 8: 99-112 for a description of derivatives of antibodies that are hyperglycosylated on the Fab domain of the full-length antibody).

[0506] FIG. 21. Clustal Multiple Sequence Alignment of AAV capsids 1-9. Amino acid substitutions (shown in bold in the bottom rows) can be made to AAV9 and AAV8 capsids by “recruiting” amino acid residues from the corresponding position of other aligned AAV capsids. Sequence shown in gray=hypervariable regions. The amino acid sequences of the AAV capsids are assigned SEQ ID NOs as follows: AAV1 is SEQ ID NO: 274; AAV2 is SEQ ID NO: 275; AAV3-3 is SEQ ID NO: 276; AAV4-4 is SEQ ID NO: 277; AAV5 is SEQ ID NO: 278; AAV6 is SEQ ID NO: 279; AAV7 is SEQ ID NO: 280; AAV8 is SEQ ID NO: 143; AAV9 is SEQ ID NO: 144; AAVrh10 is SEQ ID NO: 145; hu31 is SEQ ID NO: 281; and hu32 is SEQ ID NO: 282.

[0507] FIG. 22. Glycans that can be attached to HuGlyFab regions of full length mAbs or the antigen-binding domains. (Adapted from Bondt et al., 2014, Mol & Cell Proteomics 13.1: 3029-3039).

[0508] FIG. 23. Clustal Multiple Sequence Alignment of constant heavy chain regions (CH2 and CH3) of IgG1 (SEQ ID NO: 283), IgG2 (SEQ ID NO: 284), and IgG4 (SEQ ID NO: 285). The hinge region, from residue 219 to residue 230 of the heavy chain, is shown in italics. The numbering of the amino acids is in EU-format.

[0509] FIGS. 24A-D. A. Schematic showing the genome configuration of AAV8 and AAV9. The expression cassette utilizes the CAG promoter (SEQ ID NO: 411) to drive expression of a human antibody that binds to and inhibits for example, plasma kallikrein (pKal) or TNFα. A mutant IL2 leader (mIL2, SEQ ID NO: 146) targets the heavy and light chains for secretion and the furin-F2A sequence (SEQ ID NO: 231) drives the cleavage of the polyprotein into heavy and light chain components. B. Transfection titration comparing CAG.L01 (SEQ ID NO: 435; containing lanadelumab sequence L01 (SEQ ID NO: 141)) and CAG.L02 (SEQ ID NO: 437; containing lanadelumab sequence L02 (SEQ ID NO: 286)) proviral plasmid constructions. Top panels demonstrate reporter transgene (eGFP) expression following transfection of different plasmid quantities (4 μg-nontransfected). Bottom left panel depicts lanadelumab expression in the cell lysate while the bottom right panel detects plasmid expressed lanadelumab secreted into the cell supernatant. C. Transfection titration comparing CAG.L02 and CAG.L03 proviral plasmid constructions. Panels depict different exposure lengths (30 seconds or 60 seconds) of expressed lanadelumab from CAG.L02 or CAG.L03 constructs secreted into the cell supernatant. D. Transfection titration comparing Lanadelumab Fab proviral plasmid constructions. Figure depicts levels of Lanadelumab Fab following transfection of different plasmid quantities. L01 construct (CAG.L01: SEQ ID NO: 435) is driven by the CB promoter, while L02 (CAG. L02: SEQ ID NO: 437) is driven by the CAG promoter (SEQ ID NO: 411).

[0510] FIG. 25. The indicated AAV9 and AAV8 vectors (n=5 per group) were administered to NGS mice via either intravenous (IV) or intramuscular (IM) routes. IV administrations were into the tail vein and IM administrations were bilateral into the gastrocnemius muscles. Mice treated with vehicle were included as controls. Seven weeks post administration mice were sacrificed, and serum human antibody levels were determined by ELISA.

[0511] FIG. 26. A time course of antibody expression (lanadelumab serum levels) in NGS mice post-AAV9 administration (n=5 per group) is shown. AAV9 vectors (2e11 gc) were injected either IV or IM and serum antibody levels were determined by ELISA at day 7 (D7), day 21 (D21), day 35 (D35), and day 49 (D49).

[0512] FIG. 27 depicts the expression of the monoclonal antibody lanadelumab (Mab 1) in C2C12 muscle cells upon transduction of the cells with different cis plasmids expressing lanadelumab under the control of different regulatory elements: CAG (SEQ ID NO: 411), LMTP6 (SEQ ID NO: 320), and ApoE.hAAT (SEQ ID NO: 412). For detection of antibody protein, following transduction, the cells were treated with FITC conjugated anti-Fc (IgG) antibody. DAPI staining is shown to confirm confluency and viability of the cells under all conditions tested.

[0513] FIGS. 28A and B. A Serum expression levels (μg/ml) of lanadelumab upon intravenous injection of C/57BL6 mice with 2.5×10¹² vg/kg of AAV8 vectors encoding a lanadelumab regulated by different liver-specific, liver-tandem and liver-muscle regulatory elements (see Table 1). CAG (SEQ ID NO: 411) and TBG (SEQ ID NO: 423) promoters were used as controls. Data from the blood draw at 1, 3, 5 and 7 weeks post injection are shown. LSPX1, liver-specific promoter 1 (SEQ ID NO: 315); LSXP2, liver-specific promoter 2 (SEQ ID NO: 316); LTP1, liver-specific tandem promoter 1 (SEQ ID NO: 317); LMTP6, liver and muscle dual-specific tandem promoter 6 (SEQ ID NO: 320). Protein expression levels were quantified by ELISA from biweekly serum collections. N=5 mice per vector. Numbers on x-axis represent the weeks post vector administration. Data represent mean+SEM. 8B. Quantification of viral genomes in liver. C57Bl/6 mice were administrated intravenously with AAV8 vectors driven by different liver-specific promoters at equivalent doses (2.5×10¹² vg/kg). N=5 mice per group. Vector DNA was analyzed by ddPCR in mouse liver samples collected at 49 days post vector administration. Data represent mean+SEM.

[0514] FIGS. 29A-F. The amino acid sequence of a transgene construct for the Fab region of therapeutic antibody directed at biological factors: anti-IL5, benralizumab (A); anti-IL5R, reslizumab (B); anti-IL13, tralokinumab (C); anti-IL31R, nemolizumab (D), anti-IgE, omalizumab (E), and anti-TSLP, tezepelumab (F). Glycosylation sites are boldface. Glutamine glycosylation sites; asparaginal (N) glycosylation sites, non-consensus asparaginal (N) glycosylation sites; and tyrosine-O-sulfation sites (italics) are as indicated in the legend. Complementarity-determining regions (CDR) are underscored. The hinge region is highlighted in grey.

[0515] FIGS. 30A and 30B. A. Route of administration and dose selection in Wistar rats. AAV8 vectors encoding vectorized lanadelumab driven by CAG promoters were injected intramuscularly at 1×10¹³ vg/kg (body weight) or intravenously at 1×10¹³ vg/kg and 1×10¹⁴ vg/kg into SD rats. Protein expression was quantified by ELISA from serum collected every three to seven days. N=3 rats per vector. Data represent mean+SEM. * indicates p<0.05, ** indicates p<0.01 with Welch's t test. B. AAV8 vectors encoding vectorized lanadelumab driven by CAG (SEQ ID NO: 411) or ApoE.hAAT (SEQ ID NO: 412) promoters were injected intravenously at 5×10¹³ vg/kg into Wistar and SD rats. Protein expression was quantified by ELISA from weekly serum collection. N=3 rats per vector. Data represent mean+SEM. P value: *, p<0.05; **, p<0.01. Serum antibody concentrations (mean and SEM) in animals of each group at each time point are presented in the table.

[0516] FIGS. 31A-31D. A. Serum anti-kallikrein (pKal) (lanadelumab) antibody concentration following AAV8 delivery. Animals received bilateral injections of 5×10¹⁰ vg/kg into the GA muscle. Serum was collected biweekly and vectorized antibody concentration was quantified with ELISA. B. Vector genome quantification from relevant tissues with digital droplet PCR (ddPCR). C. Comparison of vector gene expression from liver. Data represent relative fold gene expression as quantified by the ΔΔCT method. D. Comparison of AAV transgene expression from tissues using digital droplet PCR (ddPCR). Anti-pKal antibody mRNA copies were normalized to GAPDH mRNA copies across tissues. Data are represented as mean±SEM. Statistical significance was determined using a one-way ANOVA followed by Tukey's HSD post-test. *P<0.05, **P<0.01.

[0517] FIG. 32: Antibody concentrations in the serum of wild type mice treated with AAV8.Lanadelumab vectors produced with different BV/Sf9 production systems compared to an HEK system. C57BL/6 mice were intravenously injected with vectors at a dose of 2.5×10¹² vg/kg.

[0518] FIGS. 33A-33F. A and B show the pKal titration curve and signal-to-noise ratios for indicated pKal concentrations. C. Two pKal concentrations (6.25 nM and 12.5 nM) were used to measure the suppressive range of lanadelumab (compared to non-specific human IgG control antibody) in an antibody-dose response. C57BL/6 mice (n=5) were administered 5×10¹⁰ vector genomes (vg) (2.5×10¹² vg/kg) of ApoE.hAAT.L02.AAV8 per mouse intravenously. Shown are the compiled enzyme activities and percent reductions in pKal activity for both mouse groups D and E. The slopes of enzymatic progressive activity curves and an AMC standard were used to calculate specific pKal enzymatic activity, where significantly less activity was recorded at day 49 compared to day −7. F. The percent reduction in enzymatic activity was calculated as day 49 activity divided by that of day −7. Vectorized anti-pKal antibody-containing IgG significantly reduced pKal activity. All results are a compilation of 2-5 mice per group. To determine significance of differences, Student's t-tests were used (paired, two-tailed), where *p<0.05, **p<0.01, ***p<0.001.

[0519] FIGS. 34A-34L. Quantification of mouse paw volumes and paw swellings in carrageenan-induced paw edema mice treated with test articles. Bar charts show the paw volumes (A, C, E, G, I, and K) measured at 2 (A), 4 (C), 6 (E), 8 (G), 24 (I) and 48 (K) hours after carrageenan injection in C57BL/6 mice. Paw swelling difference (B, D, F, H, J, and L) was evaluated by calculating the difference of paw volumes measured at each time point and the baseline. N=10 mice per group. Data analysis was done with One-way ANOVA with Dunnett's post-hoc test for multiple comparisons. Data represent mean+S.DEM. P values: *, p<0.05; **, p<0.01; ***, p<0.001; ****, p<0.0001.

[0520] FIGS. 35A and 35B: Time course of mouse paw volumes measured in carrageenan-induced paw edema mice treated with test articles. Mouse paw volumes were measured before (baseline) and at different time points after 0.7% (A) or 1% (B) carrageenan injection. N=10 mice per group. Data represent mean±SEM.

[0521] FIGS. 36A and 36B: Characterization of vectorized adalimumab IgG and Fab cis plasmid expression. (A) Western blot depicting expression of adalimumab IgG and Fab derived from cell supernatant of 293T cells transfected with the respective cis plasmids. (B) Human TNFα binding ELISA derived from cells transfected with the cis plasmid. pAAV.CAG.Lanadelumab.IgG was used as a non-specific antibody (mAb) control. Data represented as mean±SEM.

[0522] FIGS. 37A-37C. Characterization of AAV8 expressed adalimumab IgG expression and activity. (A) Quantification of AAV8 expressed adalimumab at two multiplicity of infection (MOI) following transduction of 293T.AAVR cells. (B) Western blot depicting expression of adalimumab IgG heavy and light chain components at two different MOIs. (C) Human TNFα binding ELISA of adalimumab IgG derived from cell culture supernatant. Data represented as mean±SEM.

[0523] FIG. 38. Comparison of self-complementary AAV cis plasmids encoding vectorized adalimumab Fab. Negative control includes cell supernatant from non-transfected cells. Data represented as mean±SEM.

[0524] FIG. 39. Binding of TNFα across model species (mouse, rat, and human) by vectorized adalimumab IgG and Fab. Negative control included supernatant derived from non-transfected cells. Vectorized lanadelumab (pAAV.CAG.lanadelumab.IgG) functioned as a non-specific antibody control. Data represented as mean±SEM.

### 5. DETAILED DESCRIPTION OF THE INVENTION

[0525] Compositions and methods are described for the delivery of a fully human post-translationally modified (HuPTM) therapeutic monoclonal antibody (mAb) or a HuPTM antigen-binding fragment of a therapeutic mAb (for example, a fully human-glycosylated Fab (HuGlyFab) of a therapeutic mAb) to a patient (human subject) diagnosed with a disease or condition indicated for treatment with the therapeutic mAb. Delivery may be advantageously accomplished via gene therapy—e.g., by administering a viral vector or other DNA expression construct encoding a therapeutic mAb or its antigen-binding fragment (or a hyperglycosylated derivative of either) to a patient (human subject) diagnosed with a condition indicated for treatment with the therapeutic mAb—to create a permanent depot in a tissue or organ of the patient that continuously supplies the HuPTM mAb or antigen-binding fragment of the therapeutic mAb, e.g., a human-glycosylated transgene product, to a target tissue where the mAb or antigen-binding fragment there of exerts its therapeutic effect.

[0526] The HuPTM mAb or HuPTM antigen-binding fragment encoded by the transgene can include, but is not limited to, a full-length or an antigen-binding fragment of a therapeutic antibody that binds to:
[0527] Nervous system targets, including amyloid beta (Aβ or Abeta) peptides, sortilin, tau protein, SEMA4D, alpha-synuclein, and CGRP receptor,
[0528] Ocular Targets including VEGF, EpoR, ALK1, endoglin, complement component 5, and complement component 1Q,
[0529] Repulsive guidance molecule-A
[0530] Transthyretin
[0531] Connective Tissue Growth Factor
[0532] Neuromyelitis optica (NMO)/non-infectious uveitis targets and immune response targets, including interleukin 6 receptor, interleukin 6, and CD19
[0533] Integrin beta 7
[0534] Sclerostin
[0535] TNF-alpha, and
[0536] Plasma Protein Targets, such as human complement proteins, including plasma kallikrein,
[0537] Autoimmune, respiratory, and allergic disease targets, such as interleukin and interleukin receptors, including IL5, IL5R, IL13, and IL31RA, immunoglobulin E, and thymic stromal lymphopoietin
   or such mAbs or antigen-binding fragments engineered to contain additional glycosylation sites on the Fab domain (e.g., see Courtois et al., 2016, mAbs 8: 99-112 which is incorporated by reference herein in its entirety for its description of derivatives of antibodies that are hyperglycosylated on the Fab domain of the full-length antibody). The amino acid sequences of the heavy and light chains of antigen binding fragments of the foregoing are provided in Table 5, infra, and nucleotide sequences, including codon optimized versions, encoding the heavy and light chains of these antigen binding fragments are provided in Table 6

[0538] The recombinant vector used for delivering the transgene includes non-replicating recombinant adeno-associated virus vectors (“rAAV”) rAAVs are particularly attractive vectors for a number of reasons—they can transduce non-replicating cells, and therefore, can be used to deliver the transgene to tissues where cell division occurs at low levels, such as the CNS; they can be modified to preferentially target a specific organ of choice; and there are hundreds of capsid serotypes to choose from to obtain the desired tissue specificity, and/or to avoid neutralization by pre-existing patient antibodies to some AAVs. Such rAAVs include but are not limited to AAV based vectors comprising capsid components from one or more of AAV1, AAV2, AAV2.m78, AAV3, AAV4, AAV5, AAV6, AAV7, AAV8, AAV9, AAV10, AAV11, AAVrh10 or AAVrh20. In certain embodiments, AAV based vectors provided herein comprise capsids from one or more of AAV8, AAV9, AAV10, AAV11, AAVrh10 or AAVrh20 serotypes.

[0539] However, other viral vectors may be used, including but not limited to lentiviral vectors; vaccinia viral vectors, or non-viral expression vectors referred to as “naked DNA” constructs. Expression of the transgene can be controlled by constitutive or tissue-specific expression control elements.

[0540] Gene therapy constructs are designed such that both the heavy and light chains are expressed. More specifically, the heavy and light chains should be expressed at about equal amounts, in other words, the heavy and light chains are expressed at approximately a 1:1 ratio of heavy chains to light chains. The coding sequences for the heavy and light chains can be engineered in a single construct in which the heavy and light chains are separated by a cleavable linker or IRES so that separate heavy and light chain polypeptides are expressed. In certain embodiments, the coding sequences encode for a Fab or F(ab′)₂ or an scFv.

[0541] In certain embodiments, nucleic acids (e.g., polynucleotides) and nucleic acid sequences disclosed herein may be codon-optimized, for example, via any codon-optimization technique known to one of skill in the art (see, e.g., review by Quax et al., 2015, Mol Cell 59:149-161) and may also be optimized to reduce CpG dimers. Nucleotide sequences of the heavy and light chain variable domains of the therapeutic antibodies, which may be codon optimized, are disclosed in Table 6. Each heavy and light chain requires a leader to ensure proper post-translation processing and secretion (unless expressed as an scFv, in which only the N-terminal chain requires a leader sequence). Useful leader sequences for the expression of the heavy and light chains of the therapeutic antibodies in human cells are disclosed herein. An exemplary recombinant expression construct is shown in FIG. 1 and in FIG. 24A.

[0542] The production of HuPTM mAb or HuPTM Fab (including an HuPTM scFv) should result in a “biobetter” molecule for the treatment of disease accomplished via gene therapy—e.g., by administering a viral vector or other DNA expression construct encoding a full-length HuPTM mAb or HuPTM Fab or other antigen binding fragment, such as an scFv, of a therapeutic mAb to a patient (human subject) diagnosed with a disease indication for that mAb, to create a permanent depot in the subject that continuously supplies the human-glycosylated, sulfated transgene product produced by the subject's transduced cells. The cDNA construct for the HuPTMmAb or HuPTM Fab or HuPTM scFv should include a signal peptide that ensures proper co- and post-translational processing (glycosylation and protein sulfation) by the transduced human cells.

[0543] Pharmaceutical compositions suitable for administration to human subjects comprise a suspension of the recombinant vector in a formulation buffer comprising a physiologically compatible aqueous buffer, a surfactant and optional excipients. Such formulation buffer can comprise one or more of a polysaccharide, a surfactant, polymer, or oil.

[0544] As an alternative, or an additional treatment to gene therapy, the full-length HuPTM mAb or HuPTM Fab or other antigen binding fragment thereof can be produced in human cell lines by recombinant DNA technology, and the glycoprotein can be administered to patients. Human cell lines that can be used for such recombinant glycoprotein production include but are not limited to human embryonic kidney 293 cells (HEK293), fibrosarcoma HT-1080, HKB-11, CAP, HuH-7, and retinal cell lines, PER.C6, or RPE to name a few (e.g., see Dumont et al., 2015, Crit. Rev. Biotechnol. 36(6):1110-1122, which is incorporated by reference in its entirety for a review of the human cell lines that could be used for the recombinant production of the HuPTM mAb, HuPTM Fab or HuPTM scFv product, e.g., HuPTM Fab glycoprotein). To ensure complete glycosylation, especially sialylation, and tyrosine-sulfation, the cell line used for production can be enhanced by engineering the host cells to co-express α-2,6-sialyltransferase (or both α-2,3- and α-2,6-sialyltransferases) and/or TPST-1 and TPST-2 enzymes responsible for tyrosine-O-sulfation in human cells.

[0545] It is not essential that every molecule produced either in the gene therapy or protein therapy approach be fully glycosylated and sulfated. Rather, the population of glycoproteins produced should have sufficient glycosylation (including 2,6-sialylation) and sulfation to demonstrate efficacy. The goal of gene therapy treatment of the invention is to slow or arrest the progression of disease.

[0546] Combination therapies involving delivery of the full-length HuPTM mAb or HuPTM Fab or antigen binding fragment thereof to the patient accompanied by administration of other available treatments are encompassed by the methods of the invention. The additional treatments may be administered before, concurrently or subsequent to the gene therapy treatment. Such additional treatments can include but are not limited to co-therapy with the therapeutic mAb.

[0547] Also provided are methods of manufacturing the viral vectors, particularly the AAV based viral vectors. In specific embodiments, provided are methods of producing recombinant AAVs comprising culturing a host cell containing an artificial genome comprising a cis expression cassette flanked by AAV ITRs, wherein the cis expression cassette comprises a transgene encoding a therapeutic antibody operably linked to expression control elements that will control expression of the transgene in human cells; a trans expression cassette lacking AAV ITRs, wherein the trans expression cassette encodes an AAV rep and capsid protein operably linked to expression control elements that drive expression of the AAV rep and capsid proteins in the host cell in culture and supply the rep and cap proteins in trans; sufficient adenovirus helper functions to permit replication and packaging of the artificial genome by the AAV capsid proteins; and recovering recombinant AAV encapsidating the artificial genome from the cell culture.

### 5.1 Constructs

[0548] Viral vectors or other DNA expression constructs encoding an HuPTM mAb or antigen-binding fragment thereof, particularly a HuGlyFab, or a hyperglycosylated derivative of a HuPTM mAb antigen-binding fragment are provided herein. The viral vectors and other DNA expression constructs provided herein include any suitable method for delivery of a transgene to a target cell. The means of delivery of a transgene include viral vectors, liposomes, other lipid-containing complexes, other macromolecular complexes, synthetic modified mRNA, unmodified mRNA, small molecules, non-biologically active molecules (e.g., gold particles), polymerized molecules (e.g., dendrimers), naked DNA, plasmids, phages, transposons, cosmids, or episomes. In some embodiments, the vector is a targeted vector, e.g., a vector targeted to retinal pigment epithelial cells, CNS cells, muscle cells, or liver cells.

[0549] In some aspects, the disclosure provides for a nucleic acid for use, wherein the nucleic acid comprises a nucleotide sequence that encodes a HuPTM mAb or HuGlyFab or other antigen-binding fragment thereof, as a transgene described herein, operatively linked to a promoter selected for expression in tissue targeted for expression of the transgene, for example, but not limited to the CB7/CAG promoter (SEQ ID NO: 411, FIG. 24A) and associated upstream regulatory sequences (see FIG. 1), cytomegalovirus (CMV) promoter, Rous sarcoma virus (RSV) promoter, GFAP promoter (glial fibrillary acidic protein), MBP promoter (myelin basic protein), MMT promoter, EF-1 alpha promoter (SEQ ID NO: 415), mU1a (SEQ ID NO: 414), UB6 promoter, chicken beta-actin (CBA) promoter, RPE65 promoter and opsin promoter, liver-specific promoters, such as TBG (Thyroxine-binding Globulin) promoter (SEQ ID NO: 423), APOA2 promoter, SERPINA1 (hAAT) promoter, ApoE.hAAT (SEQ ID NO: 412) or mIR122 promoter, or muscle-specific promoters, such as a human desmin promoter, CK8 promoter (SEQ ID NO: 413) or Pitx3 promoter, inducible promoters, such as a hypoxia-inducible promoter or a rapamycin-inducible promoter.

[0550] In some aspects herein, transgene expression is controlled by engineered nucleic acid regulatory elements that have more than one regulatory element (promoter or enhancer), including regulatory elements that are arranged in tandem (two or three copies) that promote liver-specific expression, or both liver-specific expression and muscle-specific expression, or both liver-specific and expression and bone-specific expression. These regulatory elements include for the liver-specific expression, LSPX1 (SEQ ID NO: 315), LSPX2 (SEQ ID NO: 316), LTP1 (SEQ ID NO: 317), LTP2 (SEQ ID NO: 318), or LTP3 (SEQ ID NO: 319), liver and muscle expression, LMTP6 (SEQ ID NO: 320), LMTP13 (SEQ ID NO: 321), LMTP14 (SEQ ID NO: 322), LMTP15 (SEQ ID NO: 323), LMTP18 (SEQ ID NO: 324), LMTP19 (SEQ ID NO: 325), or LMTP20 (SEQ ID NO: 326), or liver and bone expression, LBTP1 (SEQ ID NO: 327) or LBTP2 (SEQ ID NO: 328), the sequences of which are provided in Table 1.

[0551] In certain embodiments, provided herein are recombinant vectors that comprise one or more nucleic acids (e.g., polynucleotides). The nucleic acids may comprise DNA, RNA, or a combination of DNA and RNA. In certain embodiments, the DNA comprises one or more of the sequences selected from the group consisting of promoter sequences, the sequence of the gene of interest (the transgene, e.g., the nucleotide sequences encoding the heavy and light chains of the HuPTMmAb or HuGlyFab or other antigen-binding fragment), untranslated regions, and termination sequences. In certain embodiments, viral vectors provided herein comprise a promoter operably linked to the gene of interest.

[0552] In certain embodiments, nucleic acids (e.g., polynucleotides) and nucleic acid sequences disclosed herein may be codon-optimized, for example, via any codon-optimization technique known to one of skill in the art (see, e.g., review by Quax et al., 2015, Mol Cell 59:149-161). Nucleotide sequences for expression in human cells are provided herein for the heavy and light chains of the HuGlyFabs in Table 6.

[0553] In a specific embodiment, the constructs described herein comprise the following components: (1) AAV2 inverted terminal repeats that flank the expression cassette; (2) one or more control elements, b) a chicken β-actin intron and c) a rabbit β-globin poly A signal; and (3) nucleic acid sequences coding for the heavy and light chains of a mAb or Fab, separated by a self-cleaving furin (F)/(F/T)2A linker (SEQ ID NOS: 231 or 429), ensuring expression of equal amounts of the heavy and the light chain polypeptides. An exemplary construct is shown in FIG. 1.

[0554] In a specific embodiment, the constructs described herein comprise the following components: (1) AAV2 inverted terminal repeats that flank the expression cassette; (2) one or more control elements, b) a chicken β-actin intron and c) a rabbit β-globin poly A signal; and (3) nucleic acid sequences coding for a full-length antibody comprising the heavy and light chain sequences using sequences that encode the Fab portion of the heavy chain, including the hinge region sequence, plus the Fc polypeptide of the heavy chain for the appropriate isotype and the light chain, wherein heavy and light chain nucleotide sequences are separated by a self-cleaving furin (F)/(F/T)2A linker (SEQ ID NOS: 231 or 429), ensuring expression of equal amounts of the heavy and the light chain polypeptides. An exemplary construct is shown in FIG. 24A.

### 5.1.1 mRNA Vectors

[0555] In certain embodiments, as an alternative to DNA vectors, the vectors provided herein are modified mRNA encoding for the gene of interest (e.g., the transgene, for example, HuPTMmAb or HuGlyFab or other antigen binding fragment thereof). The synthesis of modified and unmodified mRNA for delivery of a transgene to retinal pigment epithelial cells is taught, for example, in Hansson et al., J. Biol. Chem., 2015, 290(9):5661-5672, which is incorporated by reference herein in its entirety. In certain embodiments, provided herein is a modified mRNA encoding for a HuPTMmAb, HuPTM Fab, or HuPTM scFv.

### 5.1.2 Viral Vectors

[0556] Viral vectors include adenovirus, adeno-associated virus (AAV, e.g., AAV8, AAV9, AAVrh10, AAV2.7m8), lentivirus, helper-dependent adenovirus, herpes simplex virus, poxvirus, hemagglutinin virus of Japan (HVJ), alphavirus, vaccinia virus, and retrovirus vectors. Retroviral vectors include murine leukemia virus (MLV) and human immunodeficiency virus (HIV)-based vectors. Alphavirus vectors include semliki forest virus (SFV) and sindbis virus (SIN). In certain embodiments, the viral vectors provided herein are recombinant viral vectors. In certain embodiments, the viral vectors provided herein are altered such that they are replication-deficient in humans. In certain embodiments, the viral vectors are hybrid vectors, e.g., an AAV vector placed into a “helpless” adenoviral vector. In certain embodiments, provided herein are viral vectors comprising a viral capsid from a first virus and viral envelope proteins from a second virus. In specific embodiments, the second virus is vesicular stomatitus virus (VSV). In more specific embodiments, the envelope protein is VSV-G protein.

[0557] In certain embodiments, the viral vectors provided herein are HIV based viral vectors. In certain embodiments, HIV-based vectors provided herein comprise at least two polynucleotides, wherein the gag and pol genes are from an HIV genome and the env gene is from another virus.

[0558] In certain embodiments, the viral vectors provided herein are herpes simplex virus-based viral vectors. In certain embodiments, herpes simplex virus-based vectors provided herein are modified such that they do not comprise one or more immediately early (IE) genes, rendering them non-cytotoxic.

[0559] In certain embodiments, the viral vectors provided herein are MLV based viral vectors. In certain embodiments, MLV-based vectors provided herein comprise up to 8 kb of heterologous DNA in place of the viral genes.

[0560] In certain embodiments, the viral vectors provided herein are lentivirus-based viral vectors. In certain embodiments, lentiviral vectors provided herein are derived from human lentiviruses. In certain embodiments, lentiviral vectors provided herein are derived from non-human lentiviruses. In certain embodiments, lentiviral vectors provided herein are packaged into a lentiviral capsid. In certain embodiments, lentiviral vectors provided herein comprise one or more of the following elements: long terminal repeats, a primer binding site, a polypurine tract, att sites, and an encapsidation site.

[0561] In certain embodiments, the viral vectors provided herein are alphavirus-based viral vectors. In certain embodiments, alphavirus vectors provided herein are recombinant, replication-defective alphaviruses. In certain embodiments, alphavirus replicons in the alphavirus vectors provided herein are targeted to specific cell types by displaying a functional heterologous ligand on their virion surface.

[0562] In certain embodiments, the viral vectors provided herein are AAV based viral vectors. In certain embodiments, the AAV-based vectors provided herein do not encode the AAV rep gene (required for replication) and/or the AAV cap gene (required for synthesis of the capsid proteins) (the rep and cap proteins may be provided by the packaging cells in trans). Multiple AAV serotypes have been identified. In certain embodiments, AAV-based vectors provided herein comprise components from one or more serotypes of AAV. In certain embodiments, AAV based vectors provided herein comprise capsid components from one or more of AAV1 (SEQ ID NO: 274), AAV2 (SEQ ID NO: 275), AAV2.7m8 (SEQ ID NO: 142), AAV3 (SEQ ID NO: 276), AAV4 (SEQ ID NO: 277), AAV5, AAV6 (SEQ ID NO: 279), AAV7 (SEQ ID NO: 280), AAV8 (SEQ ID NO: 143), AAV9 (SEQ ID NO: 144), AAV10, AAV11, or AAVrh10 (SEQ ID NO: 145). In certain embodiments, AAV based vectors provided herein comprise components from one or more of AAV8, AAV9, AAV10, AAV11, or AAVrh10 serotypes. Provided are viral vectors in which the capsid protein is a variant of the AAV8 capsid protein (SEQ ID NO: 143), AAV9 capsid protein (SEQ ID NO: 144), or AAVrh10 capsid protein (SEQ ID NO: 145), and the capsid protein is e.g., at least 95%, 96%, 97%, 98%, 99% or 99.9% identical to the amino acid sequence of the AAV8 capsid protein (SEQ ID NO: 143), AAV9 capsid protein (SEQ ID NO: 144), or AAVrh10 capsid protein (SEQ ID NO: 145), while retaining the biological function of the native capsid. In certain embodiments, the encoded AAV capsid has the sequence of SEQ ID NO: 143, 144, or 145 with 1, 2, 3, 4, 5, 6, 7, 8, 9, 10, 11, 12, 13, 14, 15, 16, 17, 18, 19, 20, 21, 22, 23, 24, 25, 26, 27, 28, 29 or 30 amino acid substitutions and retaining the biological function of the AAV8 AAV9 or AAVrh10 capsid. FIG. 21 provides a comparative alignment of the amino acid sequences of the capsid proteins of different AAV serotypes with potential amino acids that may be substituted at certain positions in the aligned sequences based upon the comparison in the row labeled SUBS. Accordingly, in specific embodiments, the AAV vector comprises an AAV8, AAV9 or AAVrh10 capsid variant that has 1, 2, 3, 4, 5, 6, 7, 8, 9, 10, 11, 12, 13, 14, 15, 16, 17, 18, 19, 20, 21, 22, 23, 24, 25, 26, 27, 28, 29 or 30 amino acid substitutions that are not present at that position in the native AAV capsid sequence as identified in the SUBS row of FIG. 21. Amino acid sequence for AAV8, AAV9, and AAVrh10 capsids are provided in FIG. 21.

[0563] In some embodiments, AAV-based vectors comprise components from one or more serotypes of AAV. In some embodiments, AAV based vectors provided herein comprise capsid components from one or more of AAV1, AAV2, AAV3, AAV4, AAV5, AAV6, AAV7, AAV8, AAV9, AAV10, AAV11, AAV12, AAV13, AAV14, AAV15, AAV16, AAV.rh8, AAV.rh10, AAV.rh20, AAV.rh39, AAV.Rh74, AAV.RHM4-1, AAV.hu37, AAV.Anc80, AAV.Anc80L65, AAV.7m8, AAV.PHP.B, AAV.PHP.eB, AAV2.5, AAV2tYF, AAV3B, AAV.LK03, AAV.HSC1, AAV.HSC2, AAV.HSC3, AAV.HSC4, AAV.HSC5, AAV.HSC6, AAV.HSC7, AAV.HSC8, AAV.HSC9, AAV.HSC10, AAV.HSC11, AAV.HSC12, AAV.HSC13, AAV.HSC14, AAV.HSC15, or AAV.HSC16 or other rAAV particles, or combinations of two or more thereof. In some embodiments, AAV based vectors provided herein comprise components from one or more of AAV1, AAV2, AAV3, AAV4, AAV5, AAV6, AAV7, AAV8, AAV9, AAV10, AAV11, AAV12, AAV13, AAV14, AAV15, AAV16, AAV.rh8, AAV.rh10, AAV.rh20, AAV.rh39, AAV.Rh74, AAV.RHM4-1, AAV.hu37, AAV.Anc80, AAV.Anc80L65, AAV.7m8, AAV.PHP.B, AAV.PHP.eB, AAV2.5, AAV2tYF, AAV3B, AAV.LK03, AAV.HSC1, AAV.HSC2, AAV.HSC3, AAV.HSC4, AAV.HSC5, AAV.HSC6, AAV.HSC7, AAV.HSC8, AAV.HSC9, AAV.HSC 10, AAV.HSC11, AAV.HSC12, AAV.HSC13, AAV.HSC14, AAV.HSC15, or AAV.HSC16 or other rAAV particles, or combinations of two or more thereof serotypes. In some embodiments, rAAV particles comprise a capsid protein at least 80% or more identical, e.g., 85%, 85%, 87%, 88%, 89%, 90%, 91%, 92%, 93%, 94%, 95%, 96%, 97%, 98%, 99%, 99.5%, etc., i.e. up to 100% identical, to e.g., VP1, VP2 and/or VP3 sequence of an AAV capsid serotype selected from AAV1, AAV2, AAV3, AAV4, AAV5, AAV6, AAV7, AAV8, AAV9, AAV10, AAV11, AAV12, AAV13, AAV14, AAV15, AAV16, AAV.rh8, AAV.rh10, AAV.rh20, AAV.rh39, AAV.Rh74, AAV.RHM4-1, AAV.hu37, AAV.Anc80, rAAV.Anc80L65, AAV.7m8, AAV.PHP.B, AAV.PHP.eB, AAV2.5, AAV2tYF, AAV3B, AAV.LK03, AAV.HSC1, AAV.HSC2, AAV.HSC3, AAV.HSC4, AAV.HSC5, AAV.HSC6, AAV.HSC7, AAV.HSC8, AAV.HSC9, AAV.HSC10, AAV.HSC11, AAV.HSC12, AAV.HSC13, AAV.HSC14, AAV.HSC15, or AAV.HSC16, or a derivative, modification, or pseudotype thereof.

[0564] In particular embodiments, the recombinant AAV for use in compositions and methods herein is Anc80 or Anc80L65 (see, e.g., Zinn et al., 2015, Cell Rep. 12(6): 1056-1068, which is incorporated by reference in its entirety). In particular embodiments, the recombinant AAV for use in compositions and methods herein is AAV.7m8 (including variants thereof) (see, e.g., U.S. Pat. Nos. 9,193,956; 9,458,517; 9,587,282; US 2016/0376323, and WO 2018/075798, each of which is incorporated herein by reference in its entirety). In particular embodiments, the AAV for use in compositions and methods herein is any AAV disclosed in U.S. Pat. No. 9,585,971, such as AAV-PHP.B. In particular embodiments, the AAV for use in compositions and methods herein is an AAV2/Rec2 or AAV2/Rec3 vector, which has hybrid capsid sequences derived from AAV8 and serotypes cy5, rh20 or rh39 (see, e.g., Issa et al., 2013, PLoS One 8(4): e60361, which is incorporated by reference herein for these vectors). In particular embodiments, the AAV for use in compositions and methods herein is an AAV disclosed in any of the following, each of which is incorporated herein by reference in its entirety: U.S. Pat. Nos. 7,282,199; 7,906,111; 8,524,446; 8,999,678; 8,628,966; 8,927,514; 8,734,809; 9,284,357; 9,409,953; 9,169,299; 9,193,956; 9,458,517; 9,587,282; US 2015/0374803; US 2015/0126588; US 2017/0067908; US 2013/0224836; US 2016/0215024; US 2017/0051257; PCT/US2015/034799; and PCT/EP2015/053335. In some embodiments, rAAV particles have a capsid protein at least 80% or more identical, e.g., 85%, 85%, 87%, 88%, 89%, 90%, 91%, 92%, 93%, 94%, 95%, 96%, 97%, 98%, 99%, 99.5%, etc., i.e. up to 100% identical, to the VP1, VP2 and/or VP3 sequence of an AAV capsid disclosed in any of the following patents and patent applications, each of which is incorporated herein by reference in its entirety: U.S. Pat. Nos. 7,282,199; 7,906,111; 8,524,446; 8,999,678; 8,628,966; 8,927,514; 8,734,809; 9,284,357; 9,409,953; 9,169,299; 9,193,956; 9,458,517; and 9,587,282; US patent application publication nos. 2015/0374803; 2015/0126588; 2017/0067908; 2013/0224836; 2016/0215024; 2017/0051257; and International Patent Application Nos. PCT/US2015/034799; PCT/EP2015/053335.

[0565] In some embodiments, rAAV particles comprise any AAV capsid disclosed in U.S. Pat. No. 9,840,719 and WO 2015/013313, such as AAV.Rh74 and RHM4-1, each of which is incorporated herein by reference in its entirety. In some embodiments, rAAV particles comprise any AAV capsid disclosed in WO 2014/172669, such as AAV rh.74, which is incorporated herein by reference in its entirety. In some embodiments, rAAV particles comprise the capsid of AAV2/5, as described in Georgiadis et al., 2016, Gene Therapy 23: 857-862 and Georgiadis et al., 2018, Gene Therapy 25: 450, each of which is incorporated by reference in its entirety. In some embodiments, rAAV particles comprise any AAV capsid disclosed in WO 2017/070491, such as AAV2tYF, which is incorporated herein by reference in its entirety. In some embodiments, rAAV particles comprise the capsids of AAVLK03 or AAV3B, as described in Puzzo et al., 2017, Sci. Transl. Med. 29(9): 418, which is incorporated by reference in its entirety. In some embodiments, rAAV particles comprise any AAV capsid disclosed in U.S. Pat. Nos. 8,628,966; 8,927,514; 9,923,120 and WO 2016/049230, such as HSC1, HSC2, HSC3, HSC4, HSC5, HSC6, HSC7, HSC8, HSC9, HSC10, HSC11, HSC12, HSC13, HSC14, HSC15, or HSC16, each of which is incorporated by reference in its entirety.

[0566] In some embodiments, rAAV particles have a capsid protein disclosed in Intl. Appl. Publ. No. WO 2003/052051 (see, e.g., SEQ ID NO: 2 of '051 publication), WO 2005/033321 (see, e.g., SEQ ID NOs: 123 and 88 of '321 publication), WO 03/042397 (see, e.g., SEQ ID NOs: 2, 81, 85, and 97 of '397 publication), WO 2006/068888 (see, e.g., SEQ ID NOs: 1 and 3-6 of '888 publication), WO 2006/110689, (see, e.g., SEQ ID NOs: 5-38 of '689 publication) WO2009/104964 (see, e.g., SEQ ID NOs: 1-5, 7, 9, 20, 22, 24 and 31 of '964 publication), WO 2010/127097 (see, e.g., SEQ ID NOs: 5-38 of '097 publication), and WO 2015/191508 (see, e.g., SEQ ID NOs: 80-294 of '508 publication), and U.S. Appl. Publ. No. 20150023924 (see, e.g., SEQ ID NOs: 1, 5-10 of '924 publication), the contents of each of which is herein incorporated by reference in its entirety. In some embodiments, rAAV particles have a capsid protein at least 80% or more identical, e.g., 85%, 85%, 87%, 88%, 89%, 90%, 91%, 92%, 93%, 94%, 95%, 96%, 97%, 98%, 99%, 99.5%, etc., i.e. up to 100% identical, to the VP1, VP2 and/or VP3 sequence of an AAV capsid disclosed in Intl. Appl. Publ. No. WO 2003/052051 (see, e.g., SEQ ID NO: 2 of '051 publication), WO 2005/033321 (see, e.g., SEQ ID NOs: 123 and 88 of '321 publication), WO 03/042397 (see, e.g., SEQ ID NOs: 2, 81, 85, and 97 of '397 publication), WO 2006/068888 (see, e.g., SEQ ID NOs: 1 and 3-6 of '888 publication), WO 2006/110689 (see, e.g., SEQ ID NOs: 5-38 of '689 publication) WO2009/104964 (see, e.g., SEQ ID NOs: 1-5, 7, 9, 20, 22, 24 and 31 of 964 publication), WO 2010/127097 (see, e.g., SEQ ID NOs: 5-38 of '097 publication), and WO 2015/191508 (see, e.g., SEQ ID NOs: 80-294 of '508 publication), and U.S. Appl. Publ. No. 20150023924 (see, e.g., SEQ ID NOs: 1, 5-10 of '924 publication).

[0567] In additional embodiments, rAAV particles comprise a pseudotyped AAV capsid. In some embodiments, the pseudotyped AAV capsids are rAAV2/8 or rAAV2/9 pseudotyped AAV capsids. Methods for producing and using pseudotyped rAAV particles are known in the art (see, e.g., Duan et al., J. Virol., 75:7662-7671 (2001); Halbert et al., J. Virol., 74:1524-1532 (2000); Zolotukhin et al., Methods 28:158-167 (2002); and Auricchio et al., Hum. Molec. Genet. 10:3075-3081, (2001).

[0568] AAV8-based, AAV9-based, and AAVrh10-based viral vectors are used in certain of the methods described herein. Nucleotide sequences of AAV based viral vectors and methods of making recombinant AAV and AAV capsids are taught, for example, in U.S. Pat. Nos. 7,282,199 B2, 7,790,449 B2, 8,318,480 B2, 8,962,332 B2 and International Patent Application No. PCT/EP2014/076466, each of which is incorporated herein by reference in its entirety. In one aspect, provided herein are AAV (e.g., AAV8, AAV9 or AAVrh10)-based viral vectors encoding a transgene (e.g., an HuPTM Fab). The amino acid sequences of AAV capsids, including AAV8, AAV9 and AAVrh10 are provided in FIG. 21.

[0569] In certain embodiments, a single-stranded AAV (ssAAV) may be used supra. In certain embodiments, a self-complementary vector, e.g., scAAV, may be used (see, e.g., Wu, 2007, Human Gene Therapy, 18(2):171-82, McCarty et al, 2001, Gene Therapy, Vol 8, Number 16, Pages 1248-1254; and U.S. Pat. Nos. 6,596,535; 7,125,717; and 7,456,683, each of which is incorporated herein by reference in its entirety).

[0570] In certain embodiments, the viral vectors used in the methods described herein are adenovirus based viral vectors. A recombinant adenovirus vector may be used to transfer in the transgene encoding the HuPTMmAb or HuGlyFab or antigen-binding fragment. The recombinant adenovirus can be a first-generation vector, with an E1 deletion, with or without an E3 deletion, and with the expression cassette inserted into either deleted region. The recombinant adenovirus can be a second-generation vector, which contains full or partial deletions of the E2 and E4 regions. A helper-dependent adenovirus retains only the adenovirus inverted terminal repeats and the packaging signal (phi). The transgene is inserted between the packaging signal and the 3′ITR, with or without stuffer sequences to keep the genome close to wild-type size of approximately 36 kb. An exemplary protocol for production of adenoviral vectors may be found in Alba et al., 2005, “Gutless adenovirus: last generation adenovirus for gene therapy,” Gene Therapy 12:S18-S27, which is incorporated by reference herein in its entirety.

[0571] In certain embodiments, the viral vectors used in the methods described herein are lentivirus based viral vectors. A recombinant lentivirus vector may be used to transfer in the transgene encoding the HuPTM mAb antigen binding fragment. Four plasmids are used to make the construct: Gag/pol sequence containing plasmid, Rev sequence containing plasmids, Envelope protein containing plasmid (e.g., VSV-G), and Cis plasmid with the packaging elements and the anti-VEGF antigen-binding fragment gene.

[0572] For lentiviral vector production, the four plasmids are co-transfected into cells (e.g., HEK293 based cells), whereby polyethylenimine or calcium phosphate can be used as transfection agents, among others. The lentivirus is then harvested in the supernatant (lentiviruses need to bud from the cells to be active, so no cell harvest needs/should be done). The supernatant is filtered (0.45 μm) and then magnesium chloride and benzonase added. Further downstream processes can vary widely, with using TFF and column chromatography being the most GMP compatible ones. Others use ultracentrifugation with/without column chromatography. Exemplary protocols for production of lentiviral vectors may be found in Lesch et al., 2011, “Production and purification of lentiviral vector generated in 293T suspension cells with baculoviral vectors,” Gene Therapy 18:531-538, and Ausubel et al., 2012, “Production of CGMP-Grade Lentiviral Vectors,” Bioprocess Int. 10(2):32-43, both of which are incorporated by reference herein in their entireties.

[0573] In a specific embodiment, a vector for use in the methods described herein is one that encodes an HuPTM mAb antigen binding fragment, such as an HuGlyFab, such that, upon introduction of the vector into a relevant cell, a glycosylated and/or tyrosine sulfated variant of the HuPTM mAb antigen binding fragment or HuGlyFab is expressed by the cell.

### 5.1.3 Promoters and Modifiers of Gene Expression

[0574] In certain embodiments, the vectors provided herein comprise components that modulate gene delivery or gene expression (e.g., “expression control elements”). In certain embodiments, the vectors provided herein comprise components that modulate gene expression. In certain embodiments, the vectors provided herein comprise components that influence binding or targeting to cells. In certain embodiments, the vectors provided herein comprise components that influence the localization of the polynucleotide (e.g., the transgene) within the cell after uptake. In certain embodiments, the vectors provided herein comprise components that can be used as detectable or selectable markers, e.g., to detect or select for cells that have taken up the polynucleotide.

[0575] In certain embodiments, the viral vectors provided herein comprise one or more promoters that control expression of the transgene. In certain embodiments, the promoter is a constitutive promoter. In certain embodiments, the promoter is a CB7 (also referred to as a CAG promoter) (see Dinculescu et al., 2005, Hum Gene Ther 16: 649-663, incorporated by reference herein in its entirety). In some embodiments, the CAG or CB7 promoter (SEQ ID NO: 411) includes other expression control elements that enhance expression of the transgene driven by the vector. In certain embodiments, the other expression control elements include chicken β-actin intron and/or rabbit β-globin polyA signal. In certain embodiments, the promoter comprises a TATA box. In certain embodiments, the promoter comprises one or more elements. In certain embodiments, the one or more promoter elements may be inverted or moved relative to one another. In certain embodiments, the elements of the promoter are positioned to function cooperatively. In certain embodiments, the elements of the promoter are positioned to function independently. In certain embodiments, the viral vectors provided herein comprise one or more promoters selected from the group consisting of the human CMV immediate early gene promoter, the SV40 early promoter, the Rous sarcoma virus (RS) long terminal repeat, and rat insulin promoter. In certain embodiments, the vectors provided herein comprise one or more long terminal repeat (LTR) promoters selected from the group consisting of AAV, MLV, MMTV, SV40, RSV, HIV-1, and HIV-2 LTRs. In certain embodiments, the vectors provided herein comprise one or more tissue specific promoters (e.g., a retinal pigment epithelial cell-specific promoter, a CNS-specific promoter, a liver-specific promoter or muscle specific). In certain embodiments, the viral vectors provided herein comprise a RPE65 promoter or an opsin promoter (a retinal cell/CNS specific promoter). In certain embodiments, the viral vectors provided herein comprises a liver cell specific promoter, such as, a TBG (Thyroxine-binding Globulin) promoter (SEQ ID NO: 423), an APOA2 promoter, a SERPINA1 (hAAT) promoter, an ApoE.hAAT promoter (SEQ ID NO: 412), or a MIR122 promoter. In certain embodiments, the viral vector provided herein comprises a muscle specific promoter, such as a human desmin promoter (Jonuschies et al., 2014, Curr. Gene Ther. 14:276-288), a CK8 promoter (SEQ ID NO: 413; Himeda et al., 2011 Muscle Gene Therapy: Methods and Protocols, Methods in Molecular Biology, Dongsheng Duan (ed.), 709:3-19; SEQ ID NO: 413), or a Pitx3 promoter (Coulon et al., 2007, JBC 282:33192). In other embodiments, the viral vector comprises a VMD2 promoter. In certain embodiments, the viral vector herein comprises synthetic and tandem promoters, e.g. the promoters listed in Table 1 below.

[0576] In certain embodiments, the promoter is an inducible promoter. In certain embodiments the promoter is a hypoxia-inducible promoter. In certain embodiments, the promoter comprises a hypoxia-inducible factor (HIF) binding site. In certain embodiments, the promoter comprises a HIF-1α binding site. In certain embodiments, the promoter comprises a HIF-2α binding site. In certain embodiments, the HIF binding site comprises an RCGTG motif. For details regarding the location and sequence of HIF binding sites, see, e.g., Schödel, et al., Blood, 2011, 117(23):e207-e217, which is incorporated by reference herein in its entirety. In certain embodiments, the promoter comprises a binding site for a hypoxia induced transcription factor other than a HIF transcription factor. In certain embodiments, the viral vectors provided herein comprise one or more IRES sites that is preferentially translated in hypoxia. For teachings regarding hypoxia-inducible gene expression and the factors involved therein, see, e.g., Kenneth and Rocha, Biochem J., 2008, 414:19-29, which is incorporated by reference herein in its entirety. In specific embodiments, the hypoxia-inducible promoter is the human N-WASP promoter, see, e.g., Salvi, 2017, Biochemistry and Biophysics Reports 9:13-21 (incorporated by reference for the teaching of the N-WASP promoter) or is the hypoxia-induced promoter of human Epo, see, e.g., Tsuchiya et al., 1993, J. Biochem. 113:395-400 (incorporated by reference for the disclosure of the Epo hypoxia-inducible promoter). In other embodiments, the promoter is a drug inducible promoter, for example, a promoter that is induced by administration of rapamycin or analogs thereof. See, e.g., the disclosure of rapamycin inducible promoters in PCT publications WO94/18317, WO 96/20951, WO 96/41865, WO 99/10508, WO 99/10510, WO 99/36553, and WO 99/41258, and U.S. Pat. No. 7,067,526, which are hereby incorporated by reference in their entireties for the disclosure of drug inducible promoters.

[0577] Provided herein are constructs containing certain ubiquitous and tissue specific promoters. Such promoters include synthetic and tandem promoters. Examples and nucleotide sequences of promoters are provided in Table 1 below.

TABLE 1
Promoter and Other Regulatory Element Sequences

| Name/ | |
|---|---|
| SEQ ID NO: | Sequence |
| LSPX1 | aggttaatttttaaaaagcagtcaaaagtccaagtggcccttggcagcatttactctctctgt |
| SEQ ID NO: 315 | ttgctctggttaataatctcaggagcacaaacattccagatccaggttaatttttaaaaagca |
| | gtcaaaagtccaagtggcccttggcagcatttactctctctgtttgctctggttaataatctc |
| | aggagcacaaacattccagatccggcgcgccagggctggaagctacctttgtctagaaggctc |
| | agaggcacacaggagtttctgggctcaccctgcccccttccaacccctcagttcccatcctcc |
| | agcagctgtttgtgtgctgcctctgaagtccacactgaacaaacttcagcctactcatgtccc |
| | taaaatgggcaaacattgcaagcagcaaacagcaaacacacagccctccctgcctgctgacct |
| | tggagctggggcagaggtcagagacctctctgggcccatgccacctccaacatccactcgacc |
| | ccttggaatttcggtggagaggagcagaggttgtcctggcgtggtttaggtagtgtgagaggg |
| | gtacccggggatcttgctaccagtggaacagccactaaggattctgcagtgagagcagagggc |
| | cagctaagtggtactctcccagagactgtctgactcacgccaccccctccaccttggacacag |
| | gacgctgtggtttctgagccaggtacaatgactcctttcggtaagtgcagtggaagctgtaca |
| | ctgcccaggcaaagcgtccgggcagcgtaggcgggcgactcagatcccagccagtggacttag |
| | cccctgtttgctcctccgataactggggtgaccttggttaatattcaccagcagcctcccccg |
| | ttgcccctctggatccactgcttaaatacggacgaggacagggccctgtctcctcagcttcag |
| | gcaccaccactgacctgggacagt |
| LSXP2 | aggctcagaggcacacaggagtttctgggctcaccctgcccocttccaacccctcagttccca |
| SEQ ID NO: 316 | tcctccagcagctgtttgtgtgctgcctctgaagtccacactgaacaaacttcagcctactca |
| | tgtccctaaaatgggcaaacattgcaagcagcaaacagcaaacacacagccctccctgcctgc |
| | tgaccttggagctggggcagaggtcagagacctctctgggcccatgccacctccaacatccac |
| | tcgaccccttggaatttcggtggagaggagcagaggttgtcctggcgtggtttaggtagtgtg |
| | agagggtctagaaggctcagaggcacacaggagtttctgggctcaccctgcccccttccaacc |
| | cctcagttcccatcctccagcagctgtttgtgtgctgcctctgaagtccacactgaacaaact |
| | tcagcctactcatgtccctaaaatgggcaaacattgcaagcagcaaacagcaaacacacagcc |
| | ctccctgcctgctgaccttggagctggggcagaggtcagagacctctctgggcccatgccacc |
| | tccaacatccactcgaccccttggaatttcggtggagaggagcagaggttgtcctggcgtggt |
| | ttaggtagtgtgagaggggtacccggggatcttgctaccagtggaacagccactaaggattct |
| | gcagtgagagcagagggccagctaagtggtactctcccagagactgtctgactcacgccaccc |
| | cctccaccttggacacaggacgctgtggtttctgagccaggtacaatgactcctttcggtaag |
| | tgcagtggaagctgtacactgcccaggcaaagcgtccgggcagcgtaggcgggcgactcagat |
| | cccagccagtggacttagcccctgtttgctcctccgataactggggtgaccttggttaatatt |
| | caccagcagcctcccccgttgcccctctggatccactgcttaaatacggacgaggacagggcc |
| | ctgtctcctcagcttcaggcaccaccactgacctgggacagt |
| LTP1 | aggttaatttttaaaaagcagtcaaaagtccaagtggcccttggcagcatttactctctctgt |
| SEQ ID NO: 317 | ttgctctggttaataatctcaggagcacaaacattccagatccaggttaatttttaaaaagca |
| | gtcaaaagtccaagtggcccttggcagcatttactctctctgtttgctctggttaataatctc |
| | aggagcacaaacattccagatccggcgcgccagggctggaagctacctttgacatcatttcct |
| | ctgcgaatgcatgtataatttctacagaacctattagaaaggatcacccagcctctgcttttg |
| | tacaactttcccttaaaaaactgccaattccactgctgtttggcccaatagtgagaacttttt |
| | cctgctgcctcttggtgcttttgcctatggcccctattctgcctgctgaagacactcttgcca |
| | gcatggacttaaacccctccagctctgacaatcctctttctcttttgttttacatgaagggtc |
| | tggcagccaaagcaatcactcaaagttcaaaccttatcattttttgctttgttcctcttggcc |
| | ttggttttgtacatcagctttgaaaataccatcccagggttaatgctggggttaatttataac |
| | taagagtgctctagttttgcaatacaggacatgctataaaaatggaaagatgttgctttctga |
| | gaggatcttgctaccagtggaacagccactaaggattctgcagtgagagcagagggccagcta |
| | agtggtactctcccagagactgtctgactcacgccaccccctccaccttggacacaggacgct |
| | gtggtttctgagccaggtacagtgactcctttcggtaagtgcagtggaagctgtacactgccc |
| | aggcaaagcgtccgggcagcgtaggcgggcgactcagatcccagccagtggacttagcccctg |
| | tttgctcctccgataactggggtgaccttggttaatattcaccagcagcctcccccgttgccc |
| | ctctggatccactgcttaaatacggacgaggacagggccctgtctcctcagcttcaggcacca |
| | ccactgacctgggacagt |
| LTP2 | aggctcagaggcacacaggagtttctgggctcaccctgcccccttccaacccctcagttccca |
| SEQ ID NO: 318 | tcctccagcagctgtttgtgtgctgcctctgaagtccacactgaacaaacttcagcctactca |
| | tgtccctaaaatgggcaaacattgcaagcagcaaacagcaaacacacagccctccctgcctgc |
| | tgaccttggagctggggcagaggtcagagacctctctgggcccatgccacctccaacatccac |
| | tcgaccccttggaatttcggtggagaggagcagaggttgtcctggcgtggtttaggtagtgtg |
| | agagggtctagagcccttaagctagcaggttaatttttaaaaagcagtcaaaagtccaagtgg |
| | cccttggcagcatttactctctctgtttgctctggttaataatctcaggagcacaaacattcc |
| | agatccaggttaatttttaaaaagcagtcaaaagtccaagtggcccttggcagcatttactct |
| | ctctgtttgctctggttaataatctcaggagcacaaacattccagatccggcgcgccagggct |
| | ggaagctacctttgacatcatttcctctgcgaatgcatgtataatttctacagaacctattag |
| | aaaggatcacccagcctctgcttttgtacaactttcccttaaaaaactgccaattccactgct |
| | gtttggcccaatagtgagaactttttcctgctgcctcttggtgcttttgcctatggcccctat |
| | tctgcctgctgaagacactcttgccagcatggacttaaacccctccagctctgacaatcctct |
| | ttctcttttgttttacatgaagggtctggcagccaaagcaatcactcaaagttcaaaccttat |
| | cattttttgctttgttcctcttggccttggttttgtacatcagctttgaaaataccatcccag |
| | ggttaatgctggggttaatttataactaagagtgctctagttttgcaatacaggacatgctat |
| | aaaaatggaaagatgttgctttctgagaggatcttgctaccagtggaacagccactaaggatt |
| | ctgcagtgagagcagagggccagctaagtggtactctcccagagactgtctgactcacgccac |
| | cccctccaccttggacacaggacgctgtggtttctgagccaggtacagtgactcctttcggta |
| | agtgcagtggaagctgtacactgcccaggcaaagcgtccgggcagcgtaggcgggcgactcag |
| | atcccagccagtggacttagcccctgtttgctcctccgataactggggtgaccttggttaata |
| | ttcaccagcagcctcccccgttgcccctctggatccactgcttaaatacggacgaggacaggg |
| | ccctgtctcctcagcttcaggcaccaccactgacctgggacagt |
| LTP3 | aggttaatttttaaaaagcagtcaaaagtccaagtggcccttggcagcatttactctctctgt |
| SEQ ID NO: 319 | ttgctctggttaataatctcaggagcacaaacattccagatccaggttaatttttaaaaagca |
| | gtcaaaagtccaagtggcccttggcagcatttactctctctgtttgctctggttaataatctc |
| | aggagcacaaacattccagatccggcgcgccagggctggaagctacctttgacatcatttcct |
| | ctgcgaatgcatgtataatttctacagaacctattagaaaggatcacccagcctctgcttttg |
| | tacaactttcccttaaaaaactgccaattccactgctgtttggcccaatagtgagaacttttt |
| | cctgctgcctcttggtgcttttgcctatggcccctattctgcctgctgaagacactcttgcca |
| | gcatggacttaaacccctccagctctgacaatcctctttctcttttgttttacatgaagggtc |
| | tggcagccaaagcaatcactcaaagttcaaaccttatcattttttgctttgttcctcttggcc |
| | ttggttttgtacatcagctttgaaaataccatcccagggttaatgctggggttaatttataac |
| | taagagtgctctagttttgcaatacaggacatgctataaaaatggaaagatgttgctttctga |
| | gaggatcttgctaccagtggaacagccactaaggattctgcagtgagagcagagggccagcta |
| | agtggtactctcccagagactgtctgactcacgccaccccctccaccttggacacaggacgct |
| | gtggtttctgagccaggtacagtgactcctttcggtaagtgcagtggaagctgtacactgccc |
| | aggcaaagcgtccgggcagcgtaggcgggcgactcagatcccagccagtggacttagcccctg |
| | tttgctcctccgataactggggtgaccttggttaatattcaccagcagcctcccccgttgccc |
| | ctctggatccactgcttaaatacggacgaggacagggccctgtctcctcagcttcaggcacca |
| | ccactgacctgggacagtaaaacaggtaagtccgctgtttgtgtgctgcctctgaagtccaca |
| | ctgaacaaacttcagcctactcatgtccctaaaatgggcaaacattgcaagcagcaaacagca |
| | aacacacagccctccctgcctgctgaccttggagctggggcagaggtcagagacctctctggc |
| | ctctactaaccatgttcatgttttctttttttttctacaggtcctgggtgacgaacag |
| LMTP6 | aggctcagaggcacacaggagtttctgggctcaccctgcccccttccaacccctcagttccca |
| SEQ ID NO: 320 | tcctccagcagctgtttgtgtgctgcctctgaagtccacactgaacaaacttcagcctactca |
| | tgtccctaaaatgggcaaacattgcaagcagcaaacagcaaacacacagccctccctgcctgc |
| | tgaccttggagctggggcagaggtcagagacctctctgggcccatgccacctccaacatccac |
| | tcgaccccttggaatttcggtggagaggagcagaggttgtcctggcgtggtttaggtagtgtg |
| | agagggccactacgggtttaggctgcccatgtaaggaggcaaggcctggggacacccgagatg |
| | cctggttataattaacccagacatgtggctgccccccccccccccaacacctgctgcctctaa |
| | aaataaccctgtccctggtggatcccactacgggtttaggctgcccatgtaaggaggcaaggc |
| | ctggggacacccgagatgcctggttataattaacccagacatgtggctgcccccccccccccc |
| | aacacctgctgcctctaaaaataaccctgtccctggtggatcccactacgggtttaggctgcc |
| | catgtaaggaggcaaggcctggggacacccgagatgcctggttataattaacccagacatgtg |
| | gctgccccccccccccccaacacctgctgcctctaaaaataaccctgtccctggtggatcccc |
| | tgcatgcgaagatcttcgaacaaggctgtgggggactgagggcaggctgtaacaggcttgggg |
| | gccagggcttatacgtgcctgggactcccaaagtattactgttccatgttcccggcgaagggc |
| | cagctgtcccccgccagctagactcagcacttagtttaggaaccagtgagcaagtcagccctt |
| | ggggcagcccatacaaggccatggggctgggcaagctgcacgcctgggtccggggtgggcacg |
| | gtgcccgggcaacgagctgaaagctcatctgctctcaggggcccctccctggggacagcccct |
| | cctggctagtcacaccctgtaggctcctctatataacccaggggcacaggggctgccctcatt |
| | ctaccaccacctccacagcacagacagacactcaggagccagccagcgtcgagatcttgctac |
| | cagtggaacagccactaaggattctgcagtgagagcagagggccagctaagtggtactctccc |
| | agagactgtctgactcacgccaccccctccaccttggacacaggacgctgtggtttctgagcc |
| | aggtacagtgactcctttcggtaagtgcagtggaagctgtacactgcccaggcaaagcgtccg |
| | ggcagcgtaggcgggcgactcagatcccagccagtggacttagcccctgtttgctcctccgat |
| | aactggggtgaccttggttaatattcaccagcagcctcccccgttgcccctctggatccactg |
| | cttaaatacggacgaggacagggccctgtctcctcagcttcaggcaccaccactgacctggga |
| | cagt |
| LMTP13 | aggctcagaggcacacaggagtttctgggctcaccctgcccccttccaacccctcagttccca |
| SEQ ID NO: 321 | tcctccagcagctgtttgtgtgctgcctctgaagtccacactgaacaaacttcagcctactca |
| | tgtccctaaaatgggcaaacattgcaagcagcaaacagcaaacacacagccctccctgcctgc |
| | tgaccttggagctggggcagaggtcagagacctctctgggcccatgccacctccaacatccac |
| | tcgaccccttggaatttcggtggagaggagcagaggttgtcctggcgtggtttaggtagtgtg |
| | agaggggtacccggggatcttgctaccagtctagaggccgtccgccctcggcaccatcctcac |
| | gacacccaaatatggcgacgggtgaggaatggtggggagttatttttagagcggtgaggaagg |
| | tgggcaggcagcaggtgttggcgctctaaaaataactcccgggagttatttttagagcggagg |
| | aatggtggacacccaaatatggcgacggttcctcacccgtcgccatatttgggtgtccgccct |
| | cggccggggccgcattcctgggggccgggcggtgctcccgcccgcctcgataaaaggctccgg |
| | ggccggcggcggcccacgagctacccggaggagcgggaggcgccaagcgtgagtatcgatctt |
| | gctaccagtggaacagccactaaggattctgcagtgagagcagagggccagctaagtggtact |
| | ctcccagagactgtctgactcacgccaccccctccaccttggacacaggacgctgtggtttct |
| | gagccaggtacagtgactcctttcggtaagtgcagtggaagctgtacactgcccaggcaaagc |
| | gtccgggcagcgtaggcgggcgactcagatcccagccagtggacttagcccctgtttgctcct |
| | ccgataactggggtgaccttggttaatattcaccagcagcctcccccgttgcccctctggatc |
| | cactgcttaaatacggacgaggacagggccctgtctcctcagcttcaggcaccaccactgacc |
| | tgggacagt |
| LMTP14 | gaatggtggacacccaaatatggcgacggttcctcacccgtcgccatatttgggtgtccgccc |
| SEQ ID NO: 322 | tcggccggggccgcattcctgggggccgggcggtgctcccgcccgcctcgataaaaggctccg |
| | gggccggcggcggcccacgagctacccggaggagcgggaggcgccaagcgatcttgctaccag |
| | tggaacagccactaaggattctgcagtgagagcagagggccagctaagtggtactctcccaga |
| | gactgtctgactcacgccaccccctccaccttggacacaggacgctgtggtttctgagccagg |
| | tacagtgactcctttcggtaagtgcagtggaagctgtacactgcccaggcaaagcgtccgggc |
| | agcgtaggcgggcgactcagatcccagccagtggacttagcccctgtttgctcctccgataac |
| | tggggtgaccttggttaatattcaccagcagcctcccccgttgcccctctggatccactgctt |
| | aaatacggacgaggacagggccctgtctcctcagcttcaggcaccaccactgacctgggacag |
| | t |
| LMTP15 | aggctcagaggcacacaggagtttctgggctcaccctgcccccttccaacccctcagttccca |
| SEQ ID NO: 323 | tcctccagcagctgtttgtgtgctgcctctgaagtccacactgaacaaacttcagcctactca |
| | tgtccctaaaatgggcaaacattgcaagcagcaaacagcaaacacacagccctccctgcctgc |
| | tgaccttggagctggggcagaggtcagagacctctctgggcccatgccacctccaacatccac |
| | tcgaccccttggaatttcggtggagaggagcagaggttgtcctggcgtggtttaggtagtgtg |
| | agagggtctagagaatggtggacacccaaatatggcgacggttcctcacccgtcgccatattt |
| | gggtgtccgccctcggccggggccgcattcctgggggccgggcggtgctcccgcccgcctcga |
| | taaaaggctccggggccggcggcggcccacgagctacccggaggagcgggaggcgccaagcga |
| | tcttgctaccagtggaacagccactaaggattctgcagtgagagcagagggccagctaagtgg |
| | tactctcccagagactgtctgactcacgccaccccctccaccttggacacaggacgctgtggt |
| | ttctgagccaggtacagtgactcctttcggtaagtgcagtggaagctgtacactgcccaggca |
| | aagcgtccgggcagcgtaggcgggcgactcagatcccagccagtggacttagcccctgtttgc |
| | tcctccgataactggggtgaccttggttaatattcaccagcagcctcccccgttgcccctctg |
| | gatccactgcttaaatacggacgaggacagggccctgtctcctcagcttcaggcaccaccact |
| | gacctgggacagt |
| LMTP18 | aggctcagaggcacacaggagtttctgggctcaccctgcccccttccaacccctcagttccca |
| SEQ ID NO: 324 | tcctccagcagctgtttgtgtgctgcctctgaagtccacactgaacaaacttcagcctactca |
| | tgtccctaaaatgggcaaacattgcaagcagcaaacagcaaacacacagccctccctgcctgc |
| | tgaccttggagctggggcagaggtcagagacctctctgggcccatgccacctccaacatccac |
| | tcgaccccttggaatttcggtggagaggagcagaggttgtcctggcgtggtttaggtagtgtg |
| | agagggccactacgggtttaggctgcccatgtaaggaggcaaggcctggggacacccgagatg |
| | cctggttataattaacccagacatgtggctgccccccccccccccaacacctgctgcctctaa |
| | aaataaccctgtccctggtggatcccctgcatgcgaagatcttcgaacaaggctgtgggggac |
| | tgagggcaggctgtaacaggcttgggggccagggcttatacgtgcctgggactcccaaagtat |
| | tactgttccatgttcccggcgaagggccagctgtcccccgccagctagactcagcacttagtt |
| | taggaaccagtgagcaagtcagcccttggggcagcccatacaaggccatggggctgggcaagc |
| | tgcacgcctgggtccggggtgggcacggtgcccgggcaacgagctgaaagctcatctgctctc |
| | aggggcccctccctggggacagcccctcctggctagtcacaccctgtaggctcctctatataa |
| | cccaggggcacaggggctgccctcattctaccaccacctccacagcacagacagacactcagg |
| | agccagccagcgtcgagatcttgctaccagtggaacagccactaaggattctgcagtgagagc |
| | agagggccagctaagtggtactctcccagagactgtctgactcacgccaccccctccaccttg |
| | gacacaggacgctgtggtttctgagccaggtacagtgactcctttcggtaagtgcagtggaag |
| | ctgtacactgcccaggcaaagcgtccgggcagcgtaggcgggcgactcagatcccagccagtg |
| | gacttagcccctgtttgctcctccgataactggggtgaccttggttaatattcaccagcagcc |
| | tcccccgttgcccctctggatccactgcttaaatacggacgaggacagggccctgtctcctca |
| | gcttcaggcaccaccactgacctgggacagt |
| LMTP19 | aggctcagaggcacacaggagtttctgggctcaccctgcccccttccaacccctcagttccca |
| SEQ ID NO: 325 | tcctccagcagctgtttgtgtgctgcctctgaagtccacactgaacaaacttcagcctactca |
| | tgtccctaaaatgggcaaacattgcaagcagcaaacagcaaacacacagccctccctgcctgc |
| | tgaccttggagctggggcagaggtcagagacctctctgggcccatgccacctccaacatccac |
| | tcgaccccttggaatttcggtggagaggagcagaggttgtcctggcgtggtttaggtagtgtg |
| | agagggccctgcatgcgaagatcttcgaacaaggctgtgggggactgagggcaggctgtaaca |
| | ggcttgggggccagggcttatacgtgcctgggactcccaaagtattactgttccatgttcccg |
| | gcgaagggccagctgtcccccgccagctagactcagcacttagtttaggaaccagtgagcaag |
| | tcagcccttggggcagcccatacaaggccatggggctgggcaagctgcacgcctgggtccggg |
| | gtgggcacggtgcccgggcaacgagctgaaagctcatctgctctcaggggcccctccctgggg |
| | acagcccctcctggctagtcacaccctgtaggctcctctatataacccaggggcacaggggct |
| | gccctcattctaccaccacctccacagcacagacagacactcaggagccagccagcgtcgaga |
| | tcttgctaccagtggaacagccactaaggattctgcagtgagagcagagggccagctaagtgg |
| | tactctcccagagactgtctgactcacgccaccccctccaccttggacacaggacgctgtggt |
| | ttctgagccaggtacagtgactcctttcggtaagtgcagtggaagctgtacactgcccaggca |
| | aagcgtccgggcagcgtaggcgggcgactcagatcccagccagtggacttagcccctgtttgc |
| | tcctccgataactggggtgaccttggttaatattcaccagcagcctcccccgttgcccctctg |
| | gatccactgcttaaatacggacgaggacagggccctgtctcctcagcttcaggcaccaccact |
| | gacctgggacagt |
| LMTP20 | aggctcagaggcacacaggagtttctgggctcaccctgcccccttccaacccctcagttccca |
| SEQ ID NO: 326 | tcctccagcagctgtttgtgtgctgcctctgaagtccacactgaacaaacttcagcctactca |
| | tgtccctaaaatgggcaaacattgcaagcagcaaacagcaaacacacagccctccctgcctgc |
| | tgaccttggagctggggcagaggtcagagacctctctgggcccatgccacctccaacatccac |
| | tcgaccccttggaatttcggtggagaggagcagaggttgtcctggcgtggtttaggtagtgtg |
| | agagggcccttcagattaaaaataactgaggtaagggcctgggtaggggaggtggtgtgagac |
| | gctcctgtctctcctctatctgcccatcggccctttggggaggaggaatgtgcccaaggacta |
| | aaaaaaggccatggagccagaggggcgagggcaacagacctttcatgggcaaaccttggggcc |
| | ctgctgaagctttggcccactacgggtttaggctgcccatgtaaggaggcaaggcctggggac |
| | acccgagatgcctggttataattaacccagacatgtggctgccccccccccccccaacacctg |
| | ctgcctctaaaaataaccctgtccctggtggatcccctgcatgcgaagatcttcgaacaaggc |
| | tgtgggggactgagggcaggctgtaacaggcttgggggccagggcttatacgtgcctgggact |
| | cccaaagtattactgttccatgttcccggcgaagggccagctgtcccccgccagctagactca |
| | gcacttagtttaggaaccagtgagcaagtcagcccttggggcagcccatacaaggccatgggg |
| | ctgggcaagctgcacgcctgggtccggggtgggcacggtgcccgggcaacgagctgaaagctc |
| | atctgctctcaggggcccctccctggggacagcccctcctggctagtcacaccctgtaggctc |
| | ctctatataacccaggggcacaggggctgccctcattctaccaccacctccacagcacagaca |
| | gacactcaggagccagccagcgtcgagatcttgctaccagtggaacagccactaaggattctg |
| | cagtgagagcagagggccagctaagtggtactctcccagagactgtctgactcacgccacccc |
| | ctccaccttggacacaggacgctgtggtttctgagccaggtacagtgactcctttcggtaagt |
| | gcagtggaagctgtacactgcccaggcaaagcgtccgggcagcgtaggcgggcgactcagatc |
| | ccagccagtggacttagcccctgtttgctcctccgataactggggtgaccttggttaatattc |
| | accagcagcctcccccgttgcccctctggatccactgcttaaatacggacgaggacagggccc |
| | tgtctcctcagcttcaggcaccaccactgacctgggacagt |
| LBTP1 | aggttaatttttaaaaagcagtcaaaagtccaagtggcccttggcagcatttactctctctgt |
| SEQ ID NO: 327 | ttgctctggttaataatctcaggagcacaaacattccagatccaggttaatttttaaaaagca |
| | gtcaaaagtccaagtggcccttggcagcatttactctctctgtttgctctggttaataatctc |
| | aggagcacaaacattccagatccggcgcgccagggctggaagctacctttgtctagaaggctc |
| | agaggcacacaggagtttctgggctcaccctgcccccttccaacccctcagttcccatcctcc |
| | agcagctgtttgtgtgctgcctctgaagtccacactgaacaaacttcagcctactcatgtccc |
| | taaaatgggcaaacattgcaagcagcaaacagcaaacacacagccctccctgcctgctgacct |
| | tggagctggggcagaggtcagagacctctctgggcccatgccacctccaacatccactcgacc |
| | ccttggaatttcggtggagaggagcagaggttgtcctggcgtggtttaggtagtgtgagaggg |
| | gtacccggggatcttgctaccagtggaacagccactaaggattctgcagtgagagcagagggc |
| | cagctaagtggtactctcccagagactgtctgactcacgccaccccctccaccttggacacag |
| | gacgctgtggtttctgagccaggtacaatgactcctttcggtaagtgcagtggaagctgtaca |
| | ctgcccaggcaaagcgtccgggcagcgtaggcgggcgactcagatcccagccagtggacttag |
| | cccctgtttgctcctccgataactggggtgaccttggttaatattcaccagcagcctcccccg |
| | ttgcccctctggatccactgcttaaatacggacgaggacagggccctgtctcctcagcttcag |
| | gcaccaccactgacctgggacagt |
| LBTP2 | aggctcagaggcacacaggagtttctgggctcaccctgcccccttccaacccctcagttccca |
| SEQ ID NO: 328 | tcctccagcagctgtttgtgtgctgcctctgaagtccacactgaacaaacttcagcctactca |
| | tgtccctaaaatgggcaaacattgcaagcagcaaacagcaaacacacagccctccctgcctgc |
| | tgaccttggagctggggcagaggtcagagacctctctgggcccatgccacctccaacatccac |
| | tcgaccccttggaatttcggtggagaggagcagaggttgtcctggcgtggtttaggtagtgtg |
| | agagggcacacatacacgaacacacatacatatacatacattcacatatatgcacacacatac |
| | acatatacacgcatacacgtacacacaaatgcacactcacacatgcacacacatacataatat |
| | acacactctcacacatgcacatacacacatacatacacatacatgtgcatgcacacacacaaa |
| | tacacatgcatacatccacattcacacagatgcagacacaaatgcacacacacacacacacac |
| | acacacacacacacacacacacacgcacactgccaccctgaactagtggtggctaaatgaaca |
| | ataagtctccatcaccagcttggggggaggtaggtggtagtgtaggtgcccccattgtgtgat |
| | catgttcattgtatgagtttgtctgtgttcattcatcatagtgacagtccccatgtgggtagc |
| | agagagtacgtgtgcatgcatcatctccgtgtttgctcatgagtgtgtatgtcagtgtgttcc |
| | agtctttctgtgtgagtgtcgtccccaatcccccatccccccccccagatctctaattagtgg |
| | tttggggtttgttccttttccctcctgttcctttcctcagcagcgcggcagcagcggcggcag |
| | cctcggtggtagcagcagcagcagcagcagcagcagcagcagcagcagcagcagcagcaacag |
| | aagctgccgcgccgctgagtagcagcaaggactccgagtcaagagtaggattgtaggattgga |
| | tctgagtgggaacaagagtgagctggcctgagagaggagcagatgcctcccagcgccctcagg |
| | ccacccattgccagtaatcttcaagccagacctcttgagaggagacgggacagccaaccctag |
| | cctacccaggtacagacactgggcagttctgggggactgcccacagatgcctattggattcct |
| | ggggtatgtaggactcccgggtctaccagcccttttcacctttccccatagcacccccaagga |
| | agctctgacaacttgcccatattcctgtttcccacccgtcccctgggcacccccttttcttct |
| | ctccctcccagatcccttctttggggagctcagcaaatggagcaggaaatttggaccctctgc |
| | ctccctctctcgccttcctcattggatccggagtcttctccgctgggaaagctgtaattagag |
| | ggtggatccctacagacagagagcagcccccccacccccaccccccagtcccttctaacttta |
| | gatctcttctctcccattctcccattctccctccctctcccttctccctctcccactggctcc |
| | tcggttctctccatctgcctgactccttgggacccggtccccagatcttgctaccagtggaac |
| | agccactaaggattctgcagtgagagcagagggccagctaagtggtactctcccagagactgt |
| | ctgactcacgccaccccctccaccttggacacaggacgctgtggtttctgagccaggtacagt |
| | gactcctttcggtaagtgcagtggaagctgtacactgcccaggcaaagcgtccgggcagcgta |
| | ggcgggcgactcagatcccagccagtggacttagcccctgtttgctcctccgataactggggt |
| | gaccttggttaatattcaccagcagcctcccccgttgcccctctggatccactgcttaaatac |
| | ggacgaggacagggccctgtctcctcagcttcaggcaccaccactgacctgggacagt |
| SP7 | cacacatacacgaacacacatacatatacatacattcacatatatgcacacacatacacatat |
| SEQ ID NO: 329 | acacgcatacacgtacacacaaatgcacactcacacatgcacacacatacataatatacacac |
| | tctcacacatgcacatacacacatacatacacatacatgtgcatgcacacacacaaatacaca |
| | tgcatacatccacattcacacagatgcagacacaaatgcacacacacacacacacacacacac |
| | acacacacacacacacacgcacactgccaccctgaactagtggtggctaaatgaacaataagt |
| | ctccatcaccagcttggggggaggtaggtggtagtgtaggtgcccccattgtgtgatcatgtt |
| | cattgtatgagtttgtctgtgttcattcatcatagtgacagtccccatgtgggtagcagagag |
| | tacgtgtgcatgcatcatctccgtgtttgctcatgagtgtgtatgtcagtgtgttccagtctt |
| | tctgtgtgagtgtcgtccccaatcccccatccccccccccagatctctaattagtggtttggg |
| | gtttgttccttttccctcctgttcctttcctcagcagcgcggcagcagcggcggcagcctcgg |
| | tggtagcagcagcagcagcagcagcagcagcagcagcagcagcagcagcagcaacagaagctg |
| | ccgcgccgctgagtagcagcaaggactccgagtcaagagtaggattgtaggattggatctgag |
| | tgggaacaagagtgagctggcctgagagaggagcagatgcctcccagcgccctcaggccaccc |
| | attgccagtaatcttcaagccagacctcttgagaggagacgggacagccaaccctagcctacc |
| | caggtacagacactgggcagttctgggggactgcccacagatgcctattggattcctggggta |
| | tgtaggactcccgggtctaccagcccttttcacctttccccatagcacccccaaggaagctct |
| | gacaacttgcccatattcctgtttcccacccgtcccctgggcacccccttttcttctctccct |
| | cccagatcccttctttggggagctcagcaaatggagcaggaaatttggaccctctgcctccct |
| | ctctcgccttcctcattggatccggagtcttctccgctgggaaagctgtaattagagggtgga |
| | tccctacagacagagagcagcccccccacccccaccccccagtcccttctaactttagatctc |
| | ttctctcccattctcccattctccctccctctcccttctccctctcccactggctcctcggtt |
| | ctctccatctgcctgactccttgggacccggtcccca |
| minSP7 | cgcggcagcagcggcggcagcctcggtggtagcagcagcagcagcagcagcagcagcagcagc |
| SEQ ID NO: 330 | agcagcagcagcagcaacagaagctgccgcgccgctgagtagcagcaaggactccgagtcaag |
| | agtaggattgtaggattggatctgagtgggaacaagagtgagctggcctgagagaggagcaga |
| | tgcctcccagcgccctcaggccacccattgccagtaatcttcaagccagacctcttgagagga |
| | gacgggacagccaaccctagcctacccaggtacagacactgggcagttctgggggactgccca |
| | cagatgcctattggattcctggggtatgtaggactcccgggtctaccagcccttttcaccttt |
| | ccccatagcacccccaaggaagctctgacaacttgcccatattcctgtttcccacccgtcccc |
| | tgggcacccccttttcttctctccctcccagatcccttctttggggagctcagcaaatggagc |
| | aggaaatttggaccctctgcctccctctctcgccttcctcattggatccggagtcttctccgc |
| | tgggaaagctgtaattagagggtggatccctacagacagagagcagcccccccacccccaccc |
| | cccagtcccttctaactttagatctcttctctcccattctcccattctccctccctctccctt |
| | ctccctctcccactggctcctcggttctctccatctgcctgactccttgggacccggtcccca |
| ApoE.hAAT | aggctcagaggcacacaggagtttctgggctcaccctgcccccttccaacccctcagttccca |
| SEQ ID NO: 412 | tcctccagcagctgtttgtgtgctgcctctgaagtccacactgaacaaacttcagcctactca |
| | tgtccctaaaatgggcaaacattgcaagcagcaaacagcaaacacacagccctccctgcctgc |
| | tgaccttggagctggggcagaggtcagagacctctctgggcccatgccacctccaacatccac |
| | tcgaccccttggaatttcggtggagaggagcagaggttgtcctggcgtggtttaggtagtgtg |
| | agaggggtacccggggatcttgctaccagtggaacagccactaaggattctgcagtgagagca |
| | gagggccagctaagtggtactctcccagagactgtctgactcacgccaccccctccaccttgg |
| | acacaggacgctgtggtttctgagccaggtacaatgactcctttcggtaagtgcagtggaagc |
| | tgtacactgcccaggcaaagcgtccgggcagcgtaggcgggcgactcagatcccagccagtgg |
| | acttagcccctgtttgctcctccgataactggggtgaccttggttaatattcaccagcagcct |
| | cccccgttgcccctctggatccactgcttaaatacggacgaggacagggccctgtctcctcag |
| | cttcaggcaccaccactgacctgggacagt |
| CAG/CB7 | gacattgattattgactagttattaatagtaatcaattacggggtcattagttcatagcccat |
| SEQ ID NO: 411 | atatggagttccgcgttacataacttacggtaaatggcccgcctggctgaccgcccaacgacc |
| | cccgcccattgacgtcaataatgacgtatgttcccatagtaacgccaatagggactttccatt |
| | gacgtcaatgggtggagtatttacggtaaactgcccacttggcagtacatcaagtgtatcata |
| | tgccaagtacgccccctattgacgtcaatgacggtaaatggcccgcctggcattatgcccagt |
| | acatgaccttatgggactttcctacttggcagtacatctacgtattagtcatcgctattacca |
| | tggtcgaggtgagccccacgttctgcttcactctccccatctcccccccctccccacccccaa |
| | ttttgtatttatttattttttaattattttgtgcagcgatgggggcggggggggggggggggc |
| | gcgcgccaggcggggcggggcggggcgaggggcggggcggggcgaggcggagaggtgcggcgg |
| | cagccaatcagagcggcgcgctccgaaagtttccttttatggcgaggcggcggcggcggcggc |
| | cctataaaaagcgaagcgcgcggcgggcgggagtcgctgcgcgctgccttcgccccgtgcccc |
| | gctccgccgccgcctcgcgccgcccgccccggctctgactgaccgcgttactcccacaggtga |
| | gcgggcgggacggcccttctcctccgggctgtaattagcgcttggtttaatgacggcttgttt |
| | cttttctgtggctgcgtgaaagccttgaggggctccgggagggccctttgtgcggggggagcg |
| | gctcggggggtgcgtgcgtgtgtgtgtgcgtggggagcgccgcgtgcggctccgcgctgcccg |
| | gcggctgtgagcgctgcgggcgcggcgcggggctttgtgcgctccgcagtgtgcgcgagggga |
| | gcgcggccgggggcggtgccccgcggtgcggggggggctgcgaggggaacaaaggctgcgtgc |
| | ggggtgtgtgcgtgggggggtgagcagggggtgtgggcgcgtcggtcgggctgcaaccccccc |
| | tgcacccccctccccgagttgctgagcacggcccggcttcgggtgcggggctccgtacggggc |
| | gtggcgcggggctcgccgtgccgggcggggggtggcggcaggtgggggtgccgggcggggcgg |
| | ggccgcctcgggccggggagggctcgggggaggggcgcggcggcccccggagcgccggcggct |
| | gtcgaggcgcggcgagccgcagccattgccttttatggtaatcgtgcgagagggcgcagggac |
| | ttcctttgtcccaaatctgtgcggagccgaaatctgggaggcgccgccgcaccccctctagcg |
| | ggcgcggggcgaagcggtgcggcgccggcaggaaggaaatgggcggggagggccttcgtgcgt |
| | cgccgcgccgccgtccccttctccctctccagcctcggggctgtccgcggggggacggctgcc |
| | ttcgggggggacggggcagggcggggttcggcttctggcgtgtgaccggcggctctagagcct |
| | ctgctaaccatgttcatgccttcttctttttcctacagctcctgggcaacgtgctggttattg |
| | tgctgtctcatcattttggcaaag |
| CK8 | ccactacgggtttaggctgcccatgtaaggaggcaaggcctggggacacccgagatgcctggt |
| SEQ ID NO: 413 | tataattaacccagacatgtggctgccccccccccccccaacacctgctgcctctaaaaataa |
| | ccctgtccctggtggatcccactacgggtttaggctgcccatgtaaggaggcaaggcctgggg |
| | acacccgagatgcctggttataattaacccagacatgtggctgccccccccccccccaacacc |
| | tgctgcctctaaaaataaccctgtccctggtggatcccactacgggtttaggctgcccatgta |
| | aggaggcaaggcctggggacacccgagatgcctggttataattaacccagacatgtggctgcc |
| | ccccccccccccaacacctgctgcctctaaaaataaccctgtccctggtggatcccctgcatg |
| | cgaagatcttcgaacaaggctgtgggggactgagggcaggctgtaacaggcttgggggccagg |
| | gcttatacgtgcctgggactcccaaagtattactgttccatgttcccggcgaagggccagctg |
| | tcccccgccagctagactcagcacttagtttaggaaccagtgagcaagtcagcccttggggca |
| | gcccatacaaggccatggggctgggcaagctgcacgcctgggtccggggtgggcacggtgccc |
| | gggcaacgagctgaaagctcatctgctctcaggggcccctccctggggacagcccctcctggc |
| | tagtcacaccctgtaggctcctctatataacccaggggcacaggggctgccctcattctacca |
| | ccacctccacagcacagacagacactcaggagccagccagcgtcga |
| mU1a | atggaggcggtactatgtagatgagaattcaggagcaaactgggaaaagcaactgcttccaaa |
| SEQ ID NO: 414 | tatttgtgatttttacagtgtagttttggaaaaactcttagcctaccaattcttctaagtgtt |
| | ttaaaatgtgggagccagtacacatgaagttatagagtgttttaatgaggcttaaatatttac |
| | cgtaactatgaaatgctacgcatatcatgctgttcaggctccgtggccacgcaactcatact |
| EF-1α | gggcagagcgcacatcgcccacagtccccgagaagttggggggaggggtcggcaattgaacgg |
| SEQ ID NO: 415 | gtgcctagagaaggtggcgcggggtaaactgggaaagtgatgtcgtgtactggctccgccttt |
| | ttcccgagggtgggggagaaccgtatataagtgcagtagtcgccgtgaacgttctttttcgca |
| | acgggtttgccgccagaacacag |
| TBG | gggctggaagctacctttgacatcatttcctctgcgaatgcatgtataatttctacagaacct |
| SEQ ID NO: 423 | attagaaaggatcacccagcctctgcttttgtacaactttcccttaaaaaactgccaattcca |
| | ctgctgtttggcccaatagtgagaactttttcctgctgcctcttggtgcttttgcctatggcc |
| | cctattctgcctgctgaagacactcttgccagcatggacttaaacccctccagctctgacaat |
| | cctctttctcttttgttttacatgaagggtctggcagccaaagcaatcactcaaagttcaaac |
| | cttatcattttttgctttgttcctcttggccttggttttgtacatcagctttgaaaataccat |
| | cccagggttaatgctggggttaatttataactaagagtgctctagttttgcaatacaggacat |
| | gctataaaaatggaaagat |
| Chimeric Intron | gtaagtatcaaggttacaagacaggtttaaggagaccaatagaaactgggcttgtcgagacag |
| SEQ ID NO: 416 | agaagactcttgcgtttctgataggcacctattggtcttactgacatccactttgcctttctc |
| | tccacag |
| VH4 Intron | gtgagtatctcagggatccagacatggggatatgggaggtgcctctgatcccagggctcactg |
| SEQ ID NO: 417 | tgggtctctctgttcacag |
| 5′ITR | ctgcgcgctcgctcgctcactgaggccgcccgggcaaagcccgggcgtcgggcgacctttggt |
| SEQ ID NO: 418 | cgcccggcctcagtgagcgagcgagcgcgcagagagggagtggccaactccatcactaggggt |
| | tcct |
| 5′-ITR | ctgcgcgctcgctcgctcactgaggccgcccgggcaaagcccgggcgtcgggcgacctttggt |
| (Deleted D- | cgcccggcctcagtgagcgagcgagcgcgcagagagggagtgg |
| sequence for self- | |
| complimentary | |
| AAV) | |
| SEQ ID NO: 419 | |
| 3′-ITR AAV | gaacccctagtgatggagttggccactccctctctgcgcgctcgctcgctcactgaggccgcc |
| SEQ ID NO: 420 | cgggcaaagcccgggcgtcgggcgacctttggtcgcccggcctcagtgagcgagcgagcgcgc |
| | agagagggagtggccaa |
| 3′-ITR | ttggccactccctctctgcgcgctcgctcgctcactgaggccgggcgaccaaaggtcgcccga |
| (Deleted D- | cgcccgggctttgcccgggcggcctcagtgagcgagcgagcgcgcag |
| sequence for self- | |
| complimentary | |
| AAV) | |
| SEQ ID NO: 421 | |

[0578] In certain embodiments, the viral vectors provided herein comprise one or more regulatory elements other than a promoter. In certain embodiments, the viral vectors provided herein comprise an enhancer. In certain embodiments, the viral vectors provided herein comprise a repressor. In certain embodiments, the viral vectors provided herein comprise an intron (e.g. VH4 intron (SEQ ID NO: 417) or a chimeric intron (SEQ ID NO: 416). In certain embodiments, the viral vectors provided herein comprise a polyadenylation sequence.

[0579] Provided are gene expression cassettes and rAAVs comprising gene expression cassettes in which expression of the transgene is controlled by engineered nucleic acid regulatory elements that have more than one regulatory element (promoter or enhancer), including regulatory elements that are arranged in tandem (two or three copies) that promote liver-specific expression, or both liver-specific expression and muscle-specific expression, or both liver-specific and expression and bone-specific expression. These regulatory elements include for the liver-specific expression, LSPX1 (SEQ ID NO: 315), LSPX2 (SEQ ID NO: 316), LTP1 (SEQ ID NO: 317), LTP2 (SEQ ID NO: 318), or LTP3 (SEQ ID NO: 319), liver and muscle expression, LMTP6 (SEQ ID NO: 320), LMTP13 (SEQ ID NO: 321), LMTP14 (SEQ ID NO: 322), LMTP15 (SEQ ID NO: 323), LMTP18 (SEQ ID NO: 324), LMTP19 (SEQ ID NO: 325), or LMTP20 (SEQ ID NO: 326), or liver and bone expression, LBTP1 (SEQ ID NO: 327) or LBTP2 (SEQ ID NO: 328), the sequences of which are provided in Table 1 supra.

### 5.1.4 Signal Peptides

[0580] In certain embodiments, the vectors provided herein comprise components that modulate protein delivery. In certain embodiments, the viral vectors provided herein comprise one or more signal peptides. Signal peptides may also be referred to herein as “leader sequences” or “leader peptides”. In certain embodiments, the signal peptides allow for the transgene product to achieve the proper packaging (e.g., glycosylation) in the cell. In certain embodiments, the signal peptides allow for the transgene product to achieve the proper localization in the cell. In certain embodiments, the signal peptides allow for the transgene product to achieve secretion from the cell.

[0581] There are two general approaches to select a signal sequence for protein production in a gene therapy context or in cell culture. One approach is to use a signal peptide from proteins homologous to the protein being expressed. For example, a human antibody signal peptide may be used to express IgGs in CHO or other cells. Another approach is to identify signal peptides optimized for the particular host cells used for expression. Signal peptides may be interchanged between different proteins or even between proteins of different organisms, but usually the signal sequences of the most abundant secreted proteins of that cell type are used for protein expression. For example, the signal peptide of human albumin, the most abundant protein in plasma, was found to substantially increase protein production yield in CHO cells. However, certain signal peptides may retain function and exert activity after being cleaved from the expressed protein as “post-targeting functions”. Thus, in specific embodiments, the signal peptide is selected from signal peptides of the most abundant proteins secreted by the cells used for expression to avoid the post-targeting functions. In a certain embodiment, the signal sequence is fused to both the heavy and light chain sequences. An exemplary sequence is MYRMQLLLLIALSLALVTNS (SEQ ID NO: 146) which can be encoded by a nucleotide sequence of SEQ ID NO: 422 (see Table 2, FIGS. 2-19 and FIGS. 29A-29F). Alternatively, signal sequences that are appropriate for expression, and may cause selective expression or directed expression of the HuPTM mAb or Fab or scFv in eye (including CNS), muscle, or liver are provided in Tables 2, 3 and 4, respectively, below.

TABLE 2
Signal peptides for expression in eye/CNS tissue

| | SEQ ID | |
|---|---|---|
| Signal Peptide Origin | NO: | Sequence |
| Mutant interleukin 2 | 146 | MYRMQLLLLIALSLALVTNS |
| signal peptide | | |
| Mutant interleukin 2 | 422 | atgtataggatgcaactgctcctcctgatt |
| signal peptide coding | | gctctgagcctggctcttgtgaccaactct |
| sequence | | |
| VEGF-A signal | 147 | MNFLLSWVHWSLALLLYLHHAKWSQA |
| peptide | | |
| Fibulin-1 signal | 148 | MERAAPSRRVPLPLLLLGGLALLAAGVDA |
| peptide | | |
| Vitronectin signal | 149 | MAPLRPLLILALLAWVALA |
| peptide | | |
| Complement Factor H | 150 | MRLLAKIICLMLWAICVA |
| signal peptide | | |
| Opticin signal peptide | 151 | MRLLAFLSLLALVLQETGT |
| Albumin signal | 152 | MKWVTFISLLFLFSSAYS |
| peptide | | |
| Chymotrypsinogen | 153 | MAFLWLLSCWALLGTTFG |
| signal peptide | | |
| Interleukin-2 signal | 154 | MYRMQLLSCIALILALVTNS |
| peptide | | |
| Trypsinogen-2 signal | 155 | MNLLLILTFVAAAVA |
| peptide | | |

TABLE 3
Signal peptides for expression in muscle cells.

| | SEQ ID | |
|---|---|---|
| Signal Peptide Origin | NO: | Sequence |
| Human SPARC | 156 | MRAWIFFLLCLAGRALA |
| Human Collagen alpha-1(I) | 157 | MFSFVDLRLLLLLAATALLTHG |
| chain | | |
| Human Lactotransferrin | 158 | MKLVFLVLLFLGALGLCLA |
| Human Complement C3 | 159 | MGPTSGPSLIILLLTHLPLALG |
| Human Lumican | 160 | MSLSAFTLFLALIGGTSG |
| Human Gelsolin isoform 1 | 161 | MAPHRPAPALLCALSLALCALSLPVRA |
| Human Pro-cathepsin H | 162 | MWATLPLLCAGAWLLGVPVCGA |
| Human SERPINF1 | 163 | MQALVLLLCIGALLGHSSC |
| Human SERPINE1 | 164 | MQMSPALTCLVLGLALVFGEGSA |
| Human Cathepsin D | 165 | MQPSSLLPLALCLLAAPASA |
| Human TIMP1 | 166 | MAPFEPLASGILLLLWLIAPSRA |
| Human Fibronectin | 167 | MLRGPGPGLLLLAVQCLGTAVPSTGASKSKR |
| Human Complement C1s | 168 | MWCIVLFSLLAWVYA |
| subcomponent | | |
| Human Cathepsin L1 | 169 | MNPTLILAAFCLGIASA |
| Human Cathepsin B | 170 | MWQLWASLCCLLVLANA |
| Human Salivary acidic | 171 | MLLILLSVALLAFSSA |
| proline-rich | | |
| phosphoprotein ½ | | |
| Human Follistatin-related | 172 | MWKRWLALALALVAVAWVRA |
| protein 1 | | |

TABLE 4
Signal peptides for expression in liver cells.

| | SEQ ID | |
|---|---|---|
| Signal Peptide Origin | NO: | Sequence |
| Human Serum albumin | 173 | MKWVTFISLLFLFSSAYS |
| Human α-1 Antitrypsin | 174 | MPSSVSWGILLLAGLCCLVPVSLA |
| (SERPINA1) | | |
| Human Apolipoprotein A-1 | 175 | MKAAVLTLAVLFLTGSQA |
| Human Apolipoprotein A-2 | 176 | MKLLAATVLLLTICSLEG |
| Human Apolipoprotein B-100 | 177 | MDPPRPALLALLALPALLLLLLAGARA |
| Human Coagulation Factor | 178 | MQRVNMIMAESPGLITICLLGYLLSAEC |
| IX | | |
| Human Complement C2 | 179 | MGPLMVLFCLLFLYPGLADS |
| Human Complement | 180 | MWLLVSVILISRISSVGG |
| Factor H-related Protein 2 | | |
| (CFHR2) | | |
| Human Complement | 181 | MLLLFSVILISWVSTVGG |
| Factor H-related Protein 5 | | |
| (CFHR5) | | |
| Human Fibrinogen α-chain | 182 | MFSMRIVCLVLSVVGTAWT |
| (FGA) | | |
| Human Fibrinogen β-chain | 183 | MKRIVIVSWSFHKLKTMKHLLLLLLCVFLVKS |
| (FGB) | | |
| Human Fibrinogen γ-chain | 184 | MSWSLHPRNLILYFYALLFLSSTCVA |
| (FGG) | | |
| Human α-2-HS- | 185 | MKSLVLLLCLAQLWGCHS |
| Glycoprotein (AHSG) | | |
| Human Hemopexin (HPX) | 186 | MARVLGAPVALGLWSLCWSLAIA |
| Human Kininogen-1 | 187 | MKLITILFLCSRLLLSLT |
| Human Mannose-binding | 188 | MSLFPSLPLLLLSMVAASYS |
| protein C (MBL2) | | |
| Human Plasminogen | 189 | MEHKEVVLLLLLFLKSGQG |
| (PLMN) | | |
| Human Prothrombin | 190 | MAHVRGLQLPGCLALAALCSLVHS |
| (Coagulation Factor II) | | |
| Human Secreted | 191 | MISRMEKMTMMMKILIMFALGMNYWSCSG |
| Phosphoprotein 24 | | |
| Human Anti-thrombin-III | 192 | MYSNVIGTVTSGKRKVYLLSLLLIGFWDCVTC |
| (SERPINC1) | | |
| Human Serotransferrin | 193 | MRLAVGALLVCAVLGLCLA |
| (TF) | | |

### 5.1.5 Polycistronic Messages—IRES and 2A Linkers and scFv Constructs

[0582] Internal ribosome entry sites. A single construct can be engineered to encode both the heavy and light chains separated by a cleavable linker or IRES so that separate heavy and light chain polypeptides are expressed by the transduced cells. In certain embodiments, the viral vectors provided herein provide polycistronic (e.g., bicistronic) messages. For example, the viral construct can encode the heavy and light chains separated by an internal ribosome entry site (IRES) elements (for examples of the use of IRES elements to create bicistronic vectors see, e.g., Gurtu et al., 1996, Biochem. Biophys. Res. Comm. 229(1):295-8, which is herein incorporated by reference in its entirety). IRES elements bypass the ribosome scanning model and begin translation at internal sites. The use of IRES in AAV is described, for example, in Furling et al., 2001, Gene Ther 8(11): 854-73, which is herein incorporated by reference in its entirety. In certain embodiments, the bicistronic message is contained within a viral vector with a restraint on the size of the polynucleotide(s) therein. In certain embodiments, the bicistronic message is contained within an AAV virus-based vector (e.g., an AAV8-based, AAV9-based or AAVrh10-based vector).

[0583] Furin-2A linkers. In other embodiments, the viral vectors provided herein encode the heavy and light chains separated by a cleavable linker such as the self-cleaving 2A and 2A-like peptides, with or without upstream furin cleavage sites, e.g. Furin/2A linkers, such as furin/F2A (F/F2A) or furin/T2A (F/T2A) linkers (Fang et al., 2005, Nature Biotechnology 23: 584-590, Fang, 2007, Mol Ther 15: 1153-9, and Chang, J. et al, MAbs 2015, 7(2):403-412, each of which is incorporated by reference herein in its entirety). For example, a furin/2A linker may be incorporated into an expression cassette to separate the heavy and light chain coding sequences, resulting in a construct with the structure:

[0584] Leader-Heavy chain-Furin site-2A site-Leader-Light chain-PolyA.

A 2A site or 2A-like site, such as an F2A site comprising the amino acid sequence RKRR(GSG)APVKQTLNFDLLKLAGDVESNPGP(SEQ ID NO: 231) or a T2A site comprising the amino acid sequence RKRR(GSG)EGRGSLLTCGDVEENPGP (SEQ ID NO: 429), is self-processing, resulting in “cleavage” between the final G and P amino acid residues. Several linkers, with or without an upstream flexible Gly-Ser-Gly (GSG) linker sequence (SEQ ID NO: 427), that could be used include but are not limited to:

T2A:
(SEQ ID NO: 227)
(GSG)EGRGSLLTCGDVEENPGP;
P2A:
(SEQ ID NO: 228)
(GSG)ATNFSLLKQAGDVEENPGP;
E2A:
(SEQ ID NO: 229)
(GSG)QCTNYALLKLAGDVESNPGP;
F2A:
(SEQ ID NO: 230)
(GSG)APVKQTLNFDLLKLAGDVESNPGP

(see also, e.g., Szymczak, et al., 2004, Nature Biotechnol 22(5):589-594, and Donnelly, et al., 2001, J Gen Virol, 82:1013-1025, each of which is incorporated herein by reference). Exemplary nucleotide sequences encoding different parts of the flexible linker are described in Table. 1-1.

TABLE 1-1

| | SEQ | |
|---|---|---|
| ID | ID NO: | Sequence |
| Furin-T2A | 424 | agaaagagaagaggctctggagaag |
| | | gcagaggctccctgctgacatgtgg |
| | | ggatgttgaagagaatcctgggcct |
| Furin | 425 | agaaagagaaga |
| Furin-GSG | 426 | agaaagagaagaggctctgga |
| linker | | |
| GSG | 427 | ggctctgga |
| T2A | 428 | gaaggcagaggctccctgctgacat |
| | | gtggggatgttgaagagaatcctgggcct |

[0585] In certain embodiments an additional proteolytic cleavage site, e.g. a furin cleavage site, is incorporated into the expression construct adjacent to the self-processing cleavage site (e.g. 2A or 2A like sequence), thereby providing a means to remove additional amino acids that remain following cleavage by the self processing cleavage sequence. Without being bound to any one theory, a peptide bond is skipped when the ribosome encounters the 2A sequence in the open reading frame, resulting in the termination of translation, or continued translation of the downstream sequence (the light chain). This self-processing sequence results in a string of additional amino acids at the end of the C-terminus of the heavy chain. However, such additional amino acids can then be cleaved by host cell Furin at the furin cleavage site(s), e.g. located immediately prior to the 2A site and after the heavy chain sequence, and further cleaved by carboxypeptidases. The resultant heavy chain may have one, two, three, or more additional amino acids included at the C-terminus, or it may not have such additional amino acids, depending on the sequence of the Furin linker used and the carboxypeptidase that cleaves the linker in vivo (See, e.g., Fang et al., 17 Apr. 2005, Nature Biotechnol. Advance Online Publication; Fang et al., 2007, Molecular Therapy 15(6):1153-1159; Luke, 2012, Innovations in Biotechnology, Ch. 8, 161-186). Furin linkers that may be used comprise a series of four basic amino acids, for example, RKRR (SEQ ID NO: 222), RRRR (SEQ ID NO: 223), RRKR (SEQ ID NO: 224), or RKKR (SEQ ID NO: 225). Once this linker is cleaved by a carboxypeptidase, additional amino acids may remain, such that an additional zero, one, two, three or four amino acids may remain on the C-terminus of the heavy chain, for example, R, RR, RK, RKR, RRR, RRK, RKK, RKRR (SEQ ID NO: 222), RRRR (SEQ ID NO: 223), RRKR (SEQ ID NO: 224), or RKKR (SEQ ID NO: 225). In certain embodiments, once the linker is cleaved by a carboxypeptidase, no additional amino acids remain. In certain embodiments, 0.5% to 1%, 1% to 2%, 5%, 10%, 15%, or 20% of the antibody, e.g., antigen-binding fragment, population produced by the constructs for use in the methods described herein has one, two, three, or four amino acids remaining on the C-terminus of the heavy chain after cleavage. In certain embodiments, the furin linker has the sequence R-X-K/R-R, such that the additional amino acids on the C-terminus of the heavy chain are R, RX, RXK, RXR, RXKR, or RXRR, where X is any amino acid, for example, alanine (A). In certain embodiments, no additional amino acids may remain on the C-terminus of the heavy chain.

[0586] Flexible peptide linker. In some embodiments, a single construct can be engineered to encode both the heavy and light chains (e.g. the heavy and light chain variable domains) separated by a flexible peptide linker such as those encoding a scFv. A flexible peptide linker can be composed of flexible residues like glycine and serine so that the adjacent heavy chain and light chain domains are free to move relative to one another. The construct may be arranged such that the heavy chain variable domain is at the N-terminus of the scFv, followed by the linker and then the light chain variable domain. Alternatively, the construct may be arranged such that the light chain variable domain is at the N-terminus of the scFv, followed by the linker and then the heavy chain variable domain. That is, the components may be arranged as NH₂—V_{L}-linker-V_{H}—COOH or NH₂—V_{H}-linker-V_{L}—COOH.

[0587] In certain embodiments, an expression cassette described herein is contained within a viral vector with a restraint on the size of the polynucleotide(s) therein. In certain embodiments, the expression cassette is contained within an AAV virus-based vector. Due to the size restraints of certain vectors, the vector may or may not accommodate the coding sequences for the full heavy and light chains of the therapeutic antibody but may accommodate the coding sequences of the heavy and light chains of antigen binding fragments, such as the heavy and light chains of a Fab or F(ab′)₂ fragment or an scFv. In particular, the AAV vectors described herein may accommodate a transgene of approximately 4.7 kilobases. For constructs such as that in FIG. 1 that contains the CB7 promoter, the chicken β-actin intron, rabbit β-globin polyA signal, and ITRs, the therapeutic antibody encoded may be approximately 752 amino acids. Substitution of smaller expression elements would permit the expression of larger protein products, such as full-length therapeutic antibodies.

### 5.1.6 Untranslated Regions

[0588] In certain embodiments, the viral vectors provided herein comprise one or more untranslated regions (UTRs), e.g., 3′ and/or 5′ UTRs. In certain embodiments, the UTRs are optimized for the desired level of protein expression. In certain embodiments, the UTRs are optimized for the mRNA half-life of the transgene. In certain embodiments, the UTRs are optimized for the stability of the mRNA of the transgene. In certain embodiments, the UTRs are optimized for the secondary structure of the mRNA of the transgene.

### 5.1.7 Inverted Terminal Repeats

[0589] In certain embodiments, the viral vectors provided herein comprise one or more inverted terminal repeat (ITR) sequences. ITR sequences may be used for packaging the recombinant gene expression cassette into the virion of the viral vector. In certain embodiments, the ITR is from an AAV, e.g., AAV8 or AAV2 (see, e.g., Yan et al., 2005, J. Virol., 79(1):364-379; U.S. Pat. No. 7,282,199 B2, U.S. Pat. No. 7,790,449 B2, U.S. Pat. No. 8,318,480 B2, U.S. Pat. No. 8,962,332 B2 and International Patent Application No. PCT/EP2014/076466, each of which is incorporated herein by reference in its entirety). In preferred embodiments, nucleotide sequences encoding the ITRs may, for example, comprise the nucleotide sequences of SEQ ID NOS: 418 (5′-ITR) or 420 (3′-ITR). In certain embodiments, the modified ITRs used to produce self-complementary vector, e.g., scAAV, may be used (see, e.g., Wu, 2007, Human Gene Therapy, 18(2):171-82, McCarty et al, 2001, Gene Therapy, Vol 8, Number 16, Pages 1248-1254; and U.S. Pat. Nos. 6,596,535; 7,125,717; and 7,456,683, each of which is incorporated herein by reference in its entirety). In preferred embodiments, nucleotide sequences encoding the modified ITRs may, for example, comprise the nucleotide sequences of SEQ ID NOS: 419 (5′-ITR) or 421 (3′-ITR).

### 5.1.8 Transgenes

[0590] The transgenes encode a HuPTM mAb, either as a full-length antibody or an antigen binding fragment thereof, e.g. a Fab fragment (an HuGlyFab) or a F(ab′)₂ or an scFv based upon a therapeutic antibody disclosed herein. In specific embodiments, the HuPTM mAb or antigen binding fragment, particularly the HuGlyFab, are engineered to contain additional glycosylation sites on the Fab domain (e.g., see Courtois et al., 2016, mAbs 8: 99-112 which is incorporated by reference herein in its entirety for it description of sites of hyperglycosylation on a Fab domain). FIG. 20 provides alignments of the Fab heavy and light chains of the therapeutic antibodies disclosed herein and highlights in green residues that may be substituted with an asparagine or, in some instances, a serine, resulting in hyperglycosylation. In addition, for the HuPTM mAb comprising an Fc domain, the Fc domain may be engineered to alter the glycosylation site at N297 to prevent glycosylation at that site (for example, a substitution at N297 for another amino acid and/or a substitution at T297 for a residue that is not a T or S to knock out the glycosylation site). Such Fc domains are “aglycosylated”.

[0591] In certain embodiments, the transgenes encode either a full-length antibody or an antigen binding fragment thereof with the coding sequence of the heavy and light chains. Such transgenes encoding the full-length antibody comprise the Fab portion and an Fc region. The Fc region is further discussed in Section 5.1.9. Exemplary sequences are provided in FIG. 23 and Table 7.

[0592] In some embodiments, antigen binding fragments are advantageously used. FIGS. 2A-2C, 3, 4A-4C, 5, 6A-6C, 7A-7B, 8A-8C, 9A-9C, 10A-10D, 11, 12A-12C, 13, 14A-14B, 15, 16A-16I, 17, 18, 19, and 29A-29F provide the amino acid sequences of the heavy and light chains of the Fab fragments of the therapeutic antibodies (see also Table 5, which provides the amino acid sequences of the Fab heavy and light chains of the therapeutic antibodies). In some embodiments, the transgene for expression of a full-length antibody may comprise the nucleotide sequences encoding the heavy and light chain sequences using nucleotide sequences that encode the Fab portion of the heavy chain, including the hinge region sequence, plus the Fc polypeptide of the heavy chain for the appropriate isotype as described further herein and the light chain. Nucleotide sequences encoding the Fab fragment portions of the heavy and light chains of the therapeutic antibodies disclosed herein are provided in Table 6. Certain of these nucleotide sequences are codon optimized for expression in human cells. Sequences for lanadelumab and adalimumab coding transgenes are provided in Tables 8 and 17, respectively. The transgene may encode a Fab fragment using nucleotide sequences encoding the sequences provided in FIGS. 2A-2C, 3, 4A-4C, 5, 6A-6C, 7A-7B, 8A-8C, 9A-9C, 10A-10D, 11, 12A-12C, 13, 14A-14B, 15, 16A-16I, 17, 18, 19, and 29A-29F, but not including the portion of the hinge region on the heavy chain that forms interchain di-sulfide bonds (e.g., the portion containing the sequence CPPCPA (SEQ ID NO: 232)). Heavy chain Fab domain sequences that do not contain a CPPCP (SEQ ID NO: 233) sequence of the hinge region at the C-terminus will not form intrachain disulfide bonds and, thus, will form Fab fragments with the corresponding light chain Fab domain sequences, whereas those heavy chain Fab domain sequences with a portion of the hinge region at the C-terminus containing the sequence CPPCP (SEQ ID NO: 233) will form intrachain disulfide bonds and, thus, will form Fab₂ fragments. For example, in some embodiments, the transgene may encode a scFv comprising a light chain variable domain and a heavy chain variable domain connected by a flexible linker in between (where the heavy chain variable domain may be either at the N-terminal end or the C-terminal end of the scFv), and optionally, may further comprise a Fc polypeptide (e.g., IgG1, IgG2, IgG3, or IgG4) on the C-terminal end of the heavy chain. Alternatively, in other embodiments, the transgene may encode F(ab′)₂ fragments comprising a nucleotide sequence that encodes the light chain and the heavy chain sequence that includes at least the sequence CPPCA (SEQ ID NO: 430) of the hinge region, as depicted in FIGS. 2A-2C, 3, 4A-4C, 5, 6A-6C, 7A-7B, 8A-8C, 9A-9C, 10A-10D, 11, 12A-12C, 13, 14A-14B, 15, 16A-16I, 17, 18, 19, and 29A-29F which depict various regions of the hinge region that may be included at the C-terminus of the heavy chain sequence. Pre-existing anti-hinge antibodies (AHA) may cause immunogenicity and reduce efficacy. Thus, in certain embodiments, for the IgG1 isotype, C-terminal ends with D221 or ends with a mutation T225L or with L242 can reduce binding to AHA. (See, e.g., Brerski, 2008, J Immunol 181: 3183-92 and Kim, 2016, 8: 1536-1547). For IgG2, the risk of AHA is lower since the hinge region of IgG2 is not as susceptible to enzymatic cleavage required to generate endogenous AHA. (See, e.g., Brerski, 2011, MAbs 3: 558-567).

[0593] In certain embodiments, the viral vectors provided herein comprise the following elements in the following order: a) a constitutive or inducible (e.g., hypoxia-inducible or rifamycin-inducible) promoter sequence or a tissue specific promoter/regulatory region, for example, one of the regulatory regions provided in Table 1, and b) a sequence encoding the transgene (e.g., a HuGlyFab). In certain embodiments, the sequence encoding the transgene comprises multiple ORFs separated by IRES elements. In certain embodiments, the ORFs encode the heavy and light chain domains of the HuGlyFab. In certain embodiments, the sequence encoding the transgene comprises multiple subunits in one ORF separated by F/F2A sequences or F/T2A sequences. In certain embodiments, the sequence comprising the transgene encodes the heavy and light chain domains of the HuGlyFab separated by an F/F2A sequence or a F/T2A sequence. In certain embodiments, the sequence comprising the transgene encodes the heavy and light chain variable domains of the HuGlyFab separated by a flexible peptide linker (as an scFv). In certain embodiments, the viral vectors provided herein comprise the following elements in the following order: a) a constitutive or an inducible promoter sequence or a tissue specific promoter, such as one of the promoters or regulatory regions in Table 1, and b) a sequence encoding the transgene (e.g., a HuGlyFab), wherein the transgene comprises a nucleotide sequence encoding a signal peptide, a light chain and a heavy chain Fab portion separated by an IRES element. In certain embodiments, the viral vectors provided herein comprise the following elements in the following order: a) a constitutive or a hypoxia-inducible promoter sequence or regulatory element listed in Table 1, and b) a sequence encoding the transgene comprising a signal peptide, a light chain and a heavy chain sequence separated by a cleavable F/F2A sequence (SEQ ID NO: 231) or a F/T2A sequence (SEQ ID NO: 429) or a flexible peptide linker.

[0594] In certain embodiments, the viral vectors provided herein comprise the following elements in the following order: a) a first ITR sequence, b) a first linker sequence, c) a constitutive or an inducible promoter sequence or a tissue specific promoter or regulatory region, d) a second linker sequence, e) an intron sequence, f) a third linker sequence, g) a first UTR sequence, h) a sequence encoding the transgene (e.g., a HuGlyFab), i) a second UTR sequence, j) a fourth linker sequence, k) a poly A sequence, 1) a fifth linker sequence, and m) a second ITR sequence.

[0595] In certain embodiments, the viral vectors provided herein comprise the following elements in the following order: a) a first ITR sequence, b) a first linker sequence, c) a constitutive or an inducible promoter sequence or a tissue specific regulatory region, d) a second linker sequence, e) an intron sequence, f) a third linker sequence, g) a first UTR sequence, h) a sequence encoding the transgene (e.g., HuGlyFab), i) a second UTR sequence, j) a fourth linker sequence, k) a poly A sequence, l) a fifth linker sequence, and m) a second ITR sequence, wherein the transgene comprises a signal, and wherein the transgene encodes a light chain and a heavy chain sequence separated by a cleavable F/2A sequence.

### 5.1.9 Fc Region Modifications

[0596] In certain embodiments, the transgenes encode full length or substantially full length heavy and light chains that associate to form a full length or intact antibody. (“Substantially intact” or “substantially full length” refers to a mAb having a heavy chain sequence that is at least 95% identical to the full-length heavy chain mAb amino acid sequence and a light chain sequence that is at least 95% identical to the full-length light chain mAb amino acid sequence). Accordingly, the transgenes comprise nucleotide sequences that encode, for example, the light and heavy chains of the Fab fragments of FIGS. 2A-2C, 3, 4A-4C, 5, 6A-6C, 7A-B, 8A-8C, 9A-9C, 10A-10D, 11, 12A-12C, 13, 14A-14B, 15, 16A-16I, 17, 18, 19, and 29A-29F including the hinge region of the heavy chain and C-terminal of the heavy chain of the Fab fragment, an Fc domain peptide. Table 7 provides the amino acid sequences of the Fc polypeptides for certain of the therapeutic antibodies described herein. Alternatively, an IgG1, IgG2, or IgG4 Fc domain, the sequences of which are provided in FIG. 23 may be utilized. As detailed, the transgene may comprise a nucleotide sequence encoding the Fc polypeptide for the therapeutic antibody linked to the nucleotide sequence encoding the heavy chain Fab fragment at the C terminus of the hinge region as provided in Table 6 (with the amino acid sequences provided in FIGS. 2A-2C, 3, 4A-4C, 5, 6A-6C, 7A-B, 8A-8C, 9A-9C, 10A-10D, 11, 12A-12C, 13, 14A-14B, 15, 16A-16I, 17, 18, 19, and 29A-29F and Table 6).

[0597] The term “Fc region” refers to a dimer of two “Fc polypeptides” (or “Fc domains”), each “Fc polypeptide” comprising the heavy chain constant region of an antibody excluding the first constant region immunoglobulin domain. In some embodiments, an “Fc region” includes two Fc polypeptides linked by one or more disulfide bonds, chemical linkers, or peptide linkers. “Fc polypeptide” refers to at least the last two constant region immunoglobulin domains of IgA, IgD, and IgG, or the last three constant region immunoglobulin domains of IgE and IgM and may also include part or all of the flexible hinge N-terminal to these domains. For IgG, e.g., “Fc polypeptide” comprises immunoglobulin domains Cgamma2 (Cγ2, often referred to as CH2 domain) and Cgamma3 (Cγ3, also referred to as CH3 domain) and may include the lower part of the hinge domain between Cgamma1 (Cγ1, also referred to as C_{H}1 domain) and CH2 domain. Although the boundaries of the Fc polypeptide may vary, the human IgG heavy chain Fc polypeptide is usually defined to comprise residues starting at T223 or C226 or P230, to its carboxyl-terminus, wherein the numbering is according to the EU index as in Kabat et al. (1991, NIH Publication 91-3242, National Technical Information Services, Springfield, Va.). For IgA, e.g., Fc polypeptide comprises immunoglobulin domains Calpha2 (Cα2) and Calpha3 (Cα3) and may include the lower part of the hinge between Calpha1 (Cα1) and Cα2.

[0598] In certain embodiments, the Fc polypeptide is that of the therapeutic antibody (see Table 7) or is the Fc polypeptide corresponding to the isotype of the therapeutic antibody (isotype is indicated in FIGS. 2A-2C, 3, 4A-4C, 5, 6A-6C, 7A-7B, 8A-8C, 9A-9C, 10A-10D, 11, 12A-12C, 13, 14A-14B, 15, 16A-16I, 17, 18, 19, and 29A-29F). In still other embodiments, the Fc polypeptide is an IgG Fc polypeptide. The Fc polypeptide may be from the IgG1, IgG2, or IgG4 isotype (see FIG. 23 for alignment of IgG1, IgG2 and IgG4 Fc domain sequences, numbered according to EU numbering) or may be an IgG3 Fc domain, depending, for example, upon the desired effector activity of the therapeutic antibody. In some embodiments, the engineered heavy chain constant region (CH), which includes the Fc domain, is chimeric. As such, a chimeric CH region combines CH domains derived from more than one immunoglobulin isotype and/or subtype. For example, the chimeric (or hybrid) CH region comprises part or all of an Fc region from IgG, IgA and/or IgM. In other examples, the chimeric CH region comprises part or all a CH2 domain derived from a human IgG1, human IgG2, or human IgG4 molecule, combined with part or all of a CH3 domain derived from a human IgG1, human IgG2, or human IgG4 molecule. In other embodiments, the chimeric CH region contains a chimeric hinge region.

[0599] In some embodiments, the recombinant vectors encode therapeutic antibodies comprising an engineered (mutant) Fc regions, e.g. engineered Fc regions of an IgG constant region. Modifications to an antibody constant region, Fc region or Fc fragment of an IgG antibody may alter one or more effector functions such as Fc receptor binding or neonatal Fc receptor (FcRn) binding and thus half-life, CDC activity, ADCC activity, and/or ADPC activity, compared to a corresponding antibody having a wild-type IgG constant region, or an IgG heavy chain constant region without the recited modification(s). Accordingly, in some embodiments, the antibody may be engineered to provide an antibody constant region, Fc region or Fc fragment of an IgG antibody that exhibits altered binding (as compared to a reference or wild-type constant region without the recited modification(s)) to one or more Fc receptors (e.g., FcγRI, FcγRIIA, FcγRIIB, FcγRIIIA, FcγRIIIB, FcγRIV, or FcRn receptor). In some embodiments, the antibody an antibody constant region, Fc region or Fc fragment of an IgG antibody that exhibits a one or more altered effector functions such as CDC, ADCC, or ADCP activity, compared to a corresponding antibody having a wild-type IgG constant region, or an IgG constant without the recited modification(s).

[0600] “Effector function” refers to a biochemical event that results from the interaction of an antibody Fc region with an Fc receptor or ligand. Effector functions include FcγR-mediated effector functions such as ADCC and ADCP and complement-mediated effector functions such as CDC.

[0601] An “effector cell” refers to a cell of the immune system that expresses one or more Fc receptors and mediates one or more effector functions. Effector cells include but are not limited to monocytes, macrophages, neutrophils, dendritic cells, eosinophils, mast cells, platelets, B cells, large granular lymphocytes, Langerhans' cells, natural killer (NK) cells, and T cells, and may be from any organism including but not limited to humans, mice, rats, rabbits, and monkeys.

[0602] “ADCC” or “antibody dependent cell-mediated cytotoxicity” refers to the cell-mediated reaction wherein nonspecific cytotoxic effector (immune) cells that express FcγRs recognize bound antibody on a target cell and subsequently cause lysis of the target cell.

[0603] “ADCP” or “antibody dependent cell-mediated phagocytosis” refers to the cell-mediated reaction wherein nonspecific cytotoxic effector (immune) cells that express FcγRs recognize bound antibody on a target cell and subsequently cause phagocytosis of the target cell.

[0604] “CDC” or “complement-dependent cytotoxicity” refers to the reaction wherein one or more complement protein components recognize bound antibody on a target cell and subsequently cause lysis of the target cell.

[0605] In some embodiments, the modifications of the Fc domain include, but are not limited to, the following modifications and combinations thereof, with reference to EU numbering of an IgG constant region (see FIG. 23): 233, 234, 235, 236, 237, 238, 239, 248, 249, 250, 252, 254, 255, 256, 258, 265, 267, 268, 269, 270, 272, 276, 278, 280, 283, 285, 286, 289, 290, 292, 293, 294, 295, 296, 297, 298, 301, 303, 305, 307, 308, 309, 311, 312, 315, 318, 320, 322, 324, 326, 327, 328, 329, 330, 331, 332, 333, 334, 335, 337, 338, 339, 340, 342, 344, 356, 358, 359, 360, 361, 362, 373, 375, 376, 378, 380, 382, 383, 384, 386, 388, 389, 398, 414, 416, 419, 428, 430, 433, 434, 435, 437, 438, and 439.

[0606] In certain embodiments, the Fc region comprises an amino acid addition, deletion, or substitution of one or more of amino acid residues 251-256, 285-290, 308-314, 385-389, and 428-436 of the IgG. In some embodiments, 251-256, 285-290, 308-314, 385-389, and 428-436 (EU numbering of Kabat; see FIG. 23) is substituted with histidine, arginine, lysine, aspartic acid, glutamic acid, serine, threonine, asparagine, or glutamine. In some embodiments, a non-histidine residue is substituted with a histidine residue. In some embodiments, a histidine residue is substituted with a non-histidine residue.

[0607] Enhancement of FcRn binding by an antibody having an engineered Fc leads to preferential binding of the affinity-enhanced antibody to FcRn as compared to antibody having wild-type Fc, and thus leads to a net enhanced recycling of the FcRn-affinity-enhanced antibody, which results in further increased antibody half-life. An enhanced recycling approach allows highly effective targeting and clearance of antigens, including e.g. “high titer” circulating antigens, such as C5, cytokines, or bacterial or viral antigens.

[0608] Provided in certain embodiments are modified constant region, Fc region or Fc fragment of an IgG antibody with enhanced binding to FcRn in serum as compared to a wild-type Fc region (without engineered modifications). In some instances, antibodies, e.g. IgG antibodies, are engineered to bind to FcRn at a neutral pH, e.g., at or above pH 7.4, to enhance pH-dependence of binding to FcRn as compared to a wild-type Fc region (without engineered modifications). In some instances, antibodies, e.g. IgG antibodies, are engineered to exhibit enhanced binding (e.g. increased affinity or K_{D}) to FcRn in endosomes (e.g., at an acidic pH, e.g., at or below pH 6.0) relative to a wild-type IgG and/or reference antibody binding to FcRn at an acidic pH, as well as in comparison to binding to FcRn in serum (e.g., at a neutral pH, e.g., at or above pH 7.4). Provided are antibodies with an engineered antibody constant region, Fc region or Fc fragment of an IgG antibody that exhibits an improved serum or resident tissue half-life, compared to a corresponding antibody having a wild-type IgG constant region, or an IgG constant without the recited modification(s);

[0609] Non-limiting examples of such Fc modifications include, e.g., a modification at position 250 (e.g., E or Q); 250 and 428 (e.g., L or F); 252 (e.g., LN/Y/W or T), 254 (e.g., S or T), and 256 (e.g., S/R/Q/E/D or T); or a modification at position 428 and/or 433 (e.g., H/L/R/S/P/Q or K) and/or 434 (e.g., H/F or Y); or a modification at position 250 and/or 428; or a modification at position 307 or 308 (e.g., 308F, V308F), and 434. In one embodiment, the modification comprises a 428L (e.g., M428L) and 434S (e.g., N434S) modification; a 428L, 2591 (e.g., V2591), and 308F (e.g., V308F) modification; a 433K (e.g., H433K) and a 434 (e.g., 434Y) modification; a 252, 254, and 256 (e.g., 252Y, 254T, and 256E) modification; a 250Q and 428L modification (e.g., T250Q and M428L); and a 307 and/or 308 modification (e.g., 308F or 308P) (EU numbering; see FIG. 23).

[0610] In some embodiments, the Fc region can be a mutant form such as hIgG1 Fc including M252 mutations, e.g. M252Y and S254T and T256E (“YTE mutation”) exhibit enhanced affinity for human FcRn (Dall'Acqua, et al., 2002, J Immunol 169:5171-5180) and subsequent crystal structure of this mutant antibody bound to hFcRn resulting in the creation of two salt bridges (Oganesyan, et al. 2014, JBC 289(11): 7812-7824). Antibodies having the YTE mutation have been administered to monkeys and humans, and have significantly improved pharmacokinetic properties (Haraya, et al., 2019, Drug Metabolism and Pharmacokinetics, 34(1):25-41).

[0611] In some embodiments, modifications to one or more amino acid residues in the Fc region may reduce half-life in systemic circulation (serum), however result in improved retainment in tissues (e.g. in the eye) by disabling FcRn binding (e.g. H435A, EU numbering of Kabat) (Ding et al., 2017, MAbs 9:269-284; and Kim, 1999, Eur J Immunol 29:2819).

[0612] In some embodiments, the Fc domain may be engineered to activate all, some, or none of the normal Fc effector functions, without affecting the Fc polypeptide's (e.g. antibody's) desired pharmacokinetic properties. Fc polypeptides having altered effector function may be desirable as they may reduce unwanted side effects, such as activation of effector cells, by the therapeutic protein.

[0613] Methods to alter or even ablate effector function may include mutation(s) or modification(s) to the hinge region amino acid residues of an antibody. For example, IgG Fc domain mutants comprising 234A, 237A, and 238S substitutions, according to the EU numbering system, exhibit decreased complement dependent lysis and/or cell mediated destruction. Deletions and/or substitutions in the lower hinge, e.g. where positions 233-236 within a hinge domain (EU numbering) are deleted or modified to glycine, have been shown in the art to significantly reduce ADCC and CDC activity.

[0614] In specific embodiments, the Fc domain is an aglycosylated Fc domain that has a substitution at residue 297 or 299 to alter the glycosylation site at 297 such that the Fc domain is not glycosylated. Such aglycosylated Fc domains may have reduced ADCC or other effector activity.

[0615] Non-limiting examples of proteins comprising mutant and/or chimeric CH regions having altered effector functions, and methods of engineering and testing mutant antibodies, are described in the art, e.g. K. L. Amour, et al., Eur. J. Immunol. 1999, 29:2613-2624; Lazar et al., Proc. Natl. Acad. Sci. USA 2006, 103:4005; US Patent Application Publication No. 20070135620A1 published Jun. 14, 2007; US Patent Application Publication No. 20080154025 A1, published Jun. 26, 2008; US Patent Application Publication No. 20100234572 A1, published Sep. 16, 2010; US Patent Application Publication No. 20120225058 A1, published Sep. 6, 2012; US Patent Application Publication No. 20150337053 A1, published Nov. 26, 2015; International Publication No. WO20/16161010A2 published Oct. 6, 2016; U.S. Pat. No. 9,359,437, issued Jun. 7, 2016; and U.S. Pat. No. 10,053,517, issued Aug. 21, 2018, all of which are herein incorporated by reference.

[0616] The C-terminal lysines (-K) conserved in the heavy chain genes of all human IgG subclasses are generally absent from antibodies circulating in serum—the C-terminal lysines are cleaved off in circulation, resulting in a heterogeneous population of circulating IgGs. (van den Bremer et al., 2015, mAbs 7:672-680). In the vectored constructs for full length mAbs, the DNA encoding the C-terminal lysine (-K) or glycine-lysine (-GK) of the Fc terminus can be deleted to produce a more homogeneous antibody product in situ. (See, Hu et al., 2017 Biotechnol. Prog. 33: 786-794 which is incorporated by reference herein in its entirety).

### 5.1.10 Manufacture and Testing of Vectors

[0617] The viral vectors provided herein may be manufactured using host cells. The viral vectors provided herein may be manufactured using mammalian host cells, for example, A549, WEHI, 10T1/2, BHK, MDCK, COS1, COS7, BSC 1, BSC 40, BMT 10, VERO, W138, HeLa, 293, Saos, C2C12, L, HT1080, HepG2, primary fibroblast, hepatocyte, and myoblast cells. The viral vectors provided herein may be manufactured using host cells from human, monkey, mouse, rat, rabbit, or hamster.

[0618] The host cells are stably transformed with the sequences encoding the transgene and associated elements (e.g., the vector genome), and the means of producing viruses in the host cells, for example, the replication and capsid genes (e.g., the rep and cap genes of AAV). For a method of producing recombinant AAV vectors with AAV8 capsids, see Section IV of the Detailed Description of U.S. Pat. No. 7,282,199 B2, which is incorporated herein by reference in its entirety. Genome copy titers of said vectors may be determined, for example, by TAQMAN® analysis. Virions may be recovered, for example, by CsCl₂ sedimentation.

[0619] Alternatively, baculovirus expression systems in insect cells may be used to produce AAV vectors. For a review, see Aponte-Ubillus et al., 2018, Appl. Microbiol. Biotechnol. 102:1045-1054 which is incorporated by reference herein in its entirety for manufacturing techniques.

[0620] In vitro assays, e.g., cell culture assays, can be used to measure transgene expression from a vector described herein, thus indicating, e.g., potency of the vector. For example, the PER.C6® Cell Line (Lonza), a cell line derived from human embryonic retinal cells, or retinal pigment epithelial cells, e.g., the retinal pigment epithelial cell line hTERT RPE-1 (available from ATCC®), can be used to assess transgene expression. Once expressed, characteristics of the expressed product can be determined, including determination of the glycosylation and tyrosine sulfation patterns associated with the HuGlyFab. Glycosylation patterns and methods of determining the same are discussed in Section 5.2.1, while tyrosine sulfation patterns and methods of determining the same are discussed in Section 5.2.2. In addition, benefits resulting from glycosylation/sulfation of the cell-expressed HuGlyFab can be determined using assays known in the art, e.g., the methods described in Sections 5.2.1 and 5.2.2.

### 5.1.10 Compositions

[0621] Pharmaceutical compositions suitable for administration to human subjects comprise a suspension of the recombinant vector in a formulation buffer comprising a physiologically compatible aqueous buffer, a surfactant and optional excipients. Such formulation buffer can comprise one or more of a polysaccharide, a surfactant, polymer, or oil. In some embodiments, the pharmaceutical composition comprises rAAV combined with a pharmaceutically acceptable carrier for administration to a subject. In one embodiment, the term “pharmaceutically acceptable” means approved by a regulatory agency of the Federal or a state government or listed in the U.S. Pharmacopeia or other generally recognized pharmacopeia for use in animals, and more particularly in humans. The term “carrier” refers to a diluent, adjuvant (e.g., Freund's complete and incomplete adjuvant), excipient, or vehicle with which the agent is administered. Such pharmaceutical carriers can be sterile liquids, such as water and oils, including those of petroleum, animal, vegetable, or synthetic origin, including, e.g., peanut oil, soybean oil, mineral oil, sesame oil and the like. Water is a common carrier when the pharmaceutical composition is administered intravenously. Saline solutions and aqueous dextrose and glycerol solutions can also be employed as liquid carriers, particularly for injectable solutions. Suitable pharmaceutical excipients include starch, glucose, lactose, sucrose, gelatin, malt, rice, flour, chalk, silica gel, sodium stearate, glycerol monostearate, talc, sodium chloride, dried skim milk, glycerol, propylene, glycol, water, ethanol and the like. Additional examples of pharmaceutically acceptable carriers, excipients, and stabilizers include, but are not limited to, buffers such as phosphate, citrate, and other organic acids; antioxidants including ascorbic acid; low molecular weight polypeptides; proteins, such as serum albumin and gelatin; hydrophilic polymers such as polyvinylpyrrolidone; amino acids such as glycine, glutamine, asparagine, arginine or lysine; monosaccharides, disaccharides, and other carbohydrates including glucose, mannose, or dextrins; chelating agents such as EDTA; sugar alcohols such as mannitol or sorbitol; salt-forming counterions such as sodium; and/or nonionic surfactants such as TWEEN′, polyethylene glycol (PEG), and PLURONICS™ as known in the art. The pharmaceutical composition of the present invention can also include a lubricant, a wetting agent, a sweetener, a flavoring agent, an emulsifier, a suspending agent, and a preservative, in addition to the above ingredients. These compositions can take the form of solutions, suspensions, emulsion, tablets, pills, capsules, powders, sustained-release formulations and the like.

### 5.2 N-Glycosylation, Tyrosine Sulfation, and O-Glycosylation

[0622] The amino acid sequence (primary sequence) of HuGlyFabs or HuPTM Fabs, HuPTMmAbs, and HuPTM scFvs disclosed herein each comprises at least one site at which N-glycosylation or tyrosine sulfation takes place (see FIGS. 2A-2C, 3, 4A-4C, 5, 6A-6C, 7A-7B, 8A-8C, 9A-9C, 10A-10D, 11, 12A-12C, 13, 14A-14B, 15, 16A-16I, 17, 18, 19, and 29A-29F) for glycosylation and/or sulfation positions within the amino acid sequences of the Fab fragments of the therapeutic antibodies). Post-translational modification also occurs in the Fc domain of full length antibodies, particularly at residue N297 (by EU numbering, see FIG. 23).

[0623] Alternatively, mutations may be introduced into the Fc domain to alter the glycosylation site at residue N297 (EU numbering, see FIG. 23), in particular substituting another amino acid for the asparagine at 297 or the threonine at 299 to remove the glycosylation site resulting in an aglycosylated Fc domain.

### 5.2.1 N-Glycosylation

[0624] Reverse Glycosylation Sites

[0625] The canonical N-glycosylation sequence is known in the art to be Asn-X-Ser (or Thr), wherein X can be any amino acid except Pro. However, it recently has been demonstrated that asparagine (Asn) residues of human antibodies can be glycosylated in the context of a reverse consensus motif, Ser(or Thr)-X-Asn, wherein X can be any amino acid except Pro. See Valliere-Douglass et al., 2009, J. Biol. Chem. 284:32493-32506; and Valliere-Douglass et al., 2010, J. Biol. Chem. 285:16012-16022. As disclosed herein, certain HuGlyFabs and HuPTM scFvs disclosed herein comprise such reverse consensus sequences.

[0626] Non-Consensus Glycosylation Sites

[0627] In addition to reverse N-glycosylation sites, it recently has been demonstrated that glutamine (Gln) residues of human antibodies can be glycosylated in the context of a non-consensus motif, Gln-Gly-Thr. See Valliere-Douglass et al., 2010, J. Biol. Chem. 285:16012-16022. Surprisingly, certain of the HuGlyFab fragments disclosed herein comprise such non-consensus sequences. In addition, O-glycosylation comprises the addition of N-acetyl-galactosamine to serine or threonine residues by the enzyme. It has been demonstrated that amino acid residues present in the hinge region of antibodies can be O-glycosylated. The possibility of O-glycosylation confers another advantage to the therapeutic antibodies provided herein, as compared to, e.g., antigen-binding fragments produced in E. coli, again because the E. coli naturally does not contain machinery equivalent to that used in human O-glycosylation. (Instead, O-glycosylation in E. coli has been demonstrated only when the bacteria is modified to contain specific O-glycosylation machinery. See, e.g., Farid-Moayer et al., 2007, J. Bacteriol. 189:8088-8098.)

[0628] Engineered N-Glycosylation Sites

[0629] In certain embodiments, a nucleic acid encoding a HuPTM mAb, HuGlyFab or HuTPM scFv is modified to include 1, 2, 3, 4, 5, 6, 7, 8, 9, 10, or more N-glycosylation sites (including the canonical N-glycosylation consensus sequence, reverse N-glycosylation site, and non-consensus N-glycosylation sites) than would normally be associated with the HuPTM mAb, HuGlyFab or HuPTM scFv (e.g., relative to the number of N-glycosylation sites associated with the HuPTM mAb, HuGlyFab or HuPTM scFv in its unmodified state). In specific embodiments, introduction of glycosylation sites is accomplished by insertion of N-glycosylation sites (including the canonical N-glycosylation consensus sequence, reverse N-glycosylation site, and non-consensus N-glycosylation sites) anywhere in the primary structure of the antigen-binding fragment, so long as said introduction does not impact binding of the antibody or antigen-binding fragment to its antigen. Introduction of glycosylation sites can be accomplished by, e.g., adding new amino acids to the primary structure of the antigen-binding fragment, or the antibody from which the antigen-binding fragment is derived (e.g., the glycosylation sites are added, in full or in part), or by mutating existing amino acids in the antigen-binding fragment, or the antibody from which the antigen-binding fragment is derived, in order to generate the N-glycosylation sites (e.g., amino acids are not added to the antigen-binding fragment/antibody, but selected amino acids of the antigen-binding fragment/antibody are mutated so as to form N-glycosylation sites). Those of skill in the art will recognize that the amino acid sequence of a protein can be readily modified using approaches known in the art, e.g., recombinant approaches that include modification of the nucleic acid sequence encoding the protein.

[0630] In a specific embodiment, a HuGlyMab or antigen-binding fragment is modified such that, when expressed in mammalian cells, such as retina, CNS, liver or muscle cells, it can be hyperglycosylated. See Courtois et al., 2016, mAbs 8:99-112 which is incorporated by reference herein in its entirety.

[0631] N-Glycosylation of HuPTM mAbs and HuPTM Antigen-Binding Fragments

[0632] Unlike small molecule drugs, biologics usually comprise a mixture of many variants with different modifications or forms that could have a different potency, pharmacokinetics, and/or safety profile. It is not essential that every molecule produced either in the gene therapy or protein therapy approach be fully glycosylated and sulfated. Rather, the population of glycoproteins produced should have sufficient glycosylation (including 2,6-sialylation) and sulfation to demonstrate efficacy. The goal of gene therapy treatment provided herein can be, for example, to slow or arrest the progression of a disease or abnormal condition or to reduce the severity of one or more symptoms associated with the disease or abnormal condition.

[0633] When a HuPTM mAb, HuGlyFab or HuPTM scFv is expressed in a human cell, the N-glycosylation sites of the antigen-binding fragment can be glycosylated with various different glycans. N-glycans of antigen-binding fragments and the Fc domain have been characterized in the art. For example, Bondt et al., 2014, Mol. & Cell. Proteomics 13.11:3029-3039 (incorporated by reference herein in its entirety for its disclosure of Fab-associated N-glycans; see also, FIG. 22) characterizes glycans associated with Fabs, and demonstrates that Fab and Fc portions of antibodies comprise distinct glycosylation patterns, with Fab glycans being high in galactosylation, sialylation, and bisection (e.g., with bisecting GlcNAc) but low in fucosylation with respect to Fc glycans. Like Bondt, Huang et al., 2006, Anal. Biochem. 349:197-207 (incorporated by reference herein in its entirety for it disclosure of Fab-associated N-glycans) found that most glycans of Fabs are sialylated. However, in the Fab of the antibody examined by Huang (which was produced in a murine cell background), the identified sialic residues were N-Glycolylneuraminic acid (“Neu5Gc” or “NeuGc”) (which is not natural to humans) instead of N-acetylneuraminic acid (“Neu5Ac,” the predominant human sialic acid). In addition, Song et al., 2014, Anal. Chem. 86:5661-5666 (incorporated by reference herein in its entirety for its disclosure of Fab-associated N-glycans) describes a library of N-glycans associated with commercially available antibodies.

[0634] Glycosylation of the Fc domain has been characterized and is a single N-linked glycan at asparagine 297 (EU numbering; see FIG. 23). The glycan plays an integral structural and functional role, impacting antibody effector function, such as binding to Fc receptor (see, for example, Jennewein and Alter, 2017, Trends In Immunology 38:358 for a discussion of the role of Fc glycosylation in antibody function). Removal of the Fc region glycan almost completely ablates effector function (Jennewien and Alter at 362). The composition of the Fc glycan has been shown to impact effector function, for example hypergalactosylation and reduction in fucosylation have been shown to increase ADCC activity while sialylation correlates with anti-inflammatory effects (Id. at 364). Disease states, genetics and even diet can impact the composition of the Fc glycan in vivo. For recombinantly expressed antibodies, the glycan composition can differ significantly by the type of host cell used for recombinant expression and strategies are available to control and modify the composition of the glycan in therapeutic antibodies recombinantly expressed in cell culture, such as CHO to alter effector function (see, for example, US 2014/0193404 by Hansen et al.). Accordingly, the HuPTM mAbs provided herein may advantageously have a glycan at N297 that is more like the native, human glycan composition than antibodies expressed in non-human host cells.

[0635] Importantly, when the HuPTM mAb, HuGlyFab or HuPTM scFv are expressed in human cells, the need for in vitro production in prokaryotic host cells (e.g., E. coli) or eukaryotic host cells (e.g., CHO cells or NS0 cells) is circumvented. Instead, as a result of the methods described herein, N-glycosylation sites of the HuPTM mAb, HuGlyFab or HuPTM scFv are advantageously decorated with glycans relevant to and beneficial to treatment of humans. Such an advantage is unattainable when CHO cells, NS0 cells, or E. coli are utilized in antibody/antigen-binding fragment production, because e.g., CHO cells (1) do not express 2,6 sialyltransferase and thus cannot add 2,6 sialic acid during N-glycosylation; (2) can add Neu5Gc as sialic acid instead of Neu5Ac; and (3) can also produce an immunogenic glycan, the α-Gal antigen, which reacts with anti-α-Gal antibodies present in most individuals, which at high concentrations can trigger anaphylaxis; and because (4) E. coli does not naturally contain components needed for N-glycosylation.

[0636] Assays for determining the glycosylation pattern of antibodies, including antigen-binding fragments are known in the art. For example, hydrazinolysis can be used to analyze glycans. First, polysaccharides are released from their associated protein by incubation with hydrazine (the Ludger Liberate Hydrazinolysis Glycan Release Kit, Oxfordshire, UK can be used). The nucleophile hydrazine attacks the glycosidic bond between the polysaccharide and the carrier protein and allows release of the attached glycans. N-acetyl groups are lost during this treatment and have to be reconstituted by re-N-acetylation. Glycans may also be released using enzymes such as glycosidases or endoglycosidases, such as PNGase F and Endo H, which cleave cleanly and with fewer side reactions than hydrazines. The free glycans can be purified on carbon columns and subsequently labeled at the reducing end with the fluorophor 2-amino benzamide. The labeled polysaccharides can be separated on a GlycoSep-N column (GL Sciences) according to the HPLC protocol of Royle et al, Anal Biochem 2002, 304(1):70-90. The resulting fluorescence chromatogram indicates the polysaccharide length and number of repeating units. Structural information can be gathered by collecting individual peaks and subsequently performing MS/MS analysis. Thereby the monosaccharide composition and sequence of the repeating unit can be confirmed and additionally in homogeneity of the polysaccharide composition can be identified. Specific peaks of low or high molecular weight can be analyzed by MALDI-MS/MS and the result used to confirm the glycan sequence. Each peak in the chromatogram corresponds to a polymer, e.g., glycan, consisting of a certain number of repeat units and fragments, e.g., sugar residues, thereof. The chromatogram thus allows measurement of the polymer, e.g., glycan, length distribution. The elution time is an indication for polymer length, while fluorescence intensity correlates with molar abundance for the respective polymer, e.g., glycan. Other methods for assessing glycans associated with antigen-binding fragments include those described by Bondt et al., 2014, Mol. & Cell. Proteomics 13.11:3029-3039, Huang et al., 2006, Anal. Biochem. 349:197-207, and/or Song et al., 2014, Anal. Chem. 86:5661-5666.

[0637] Homogeneity or heterogeneity of the glycan patterns associated with antibodies (including antigen-binding fragments), as it relates to both glycan length or size and numbers glycans present across glycosylation sites, can be assessed using methods known in the art, e.g., methods that measure glycan length or size and hydrodynamic radius. HPLC, such as size exclusion, normal phase, reversed phase, and anion exchange HPLC, as well as capillary electrophoresis, allows the measurement of the hydrodynamic radius. Higher numbers of glycosylation sites in a protein lead to higher variation in hydrodynamic radius compared to a carrier with less glycosylation sites. However, when single glycan chains are analyzed, they may be more homogenous due to the more controlled length. Glycan length can be measured by hydrazinolysis, SDS PAGE, and capillary gel electrophoresis. In addition, homogeneity can also mean that certain glycosylation site usage patterns change to a broader/narrower range. These factors can be measured by Glycopeptide LC-MS/MS.

[0638] In certain embodiments, the HuPTM mAbs, or antigen binding fragments thereof, also do not contain detectable NeuGc and/or α-Gal. By “detectable NeuGc” or “detectable α-Gal” or “does not contain or does not have NeuGc or α-Gal” means herein that the HuPTM mAb or antigen-binding fragment, does not contain NeuGc or α-Gal moieties detectable by standard assay methods known in the art. For example, NeuGc may be detected by HPLC according to Hara et al., 1989, “Highly Sensitive Determination of N-Acetyl- and N-Glycolylneuraminic Acids in Human Serum and Urine and Rat Serum by Reversed-Phase Liquid Chromatography with Fluorescence Detection.” J. Chromatogr., B: Biomed. 377, 111-119, which is hereby incorporated by reference for the method of detecting NeuGc. Alternatively, NeuGc may be detected by mass spectrometry. The α-Gal may be detected using an ELISA, see, for example, Galili et al., 1998, “A sensitive assay for measuring α-Gal epitope expression on cells by a monoclonal anti-Gal antibody.” Transplantation. 65(8):1129-32, or by mass spectrometry, see, for example, Ayoub et al., 2013, “Correct primary structure assessment and extensive glyco-profiling of cetuximab by a combination of intact, middle-up, middle-down and bottom-up ESI and MALDI mass spectrometry techniques.” Landes Bioscience. 5(5):699-710. See also the references cited in Platts-Mills et al., 2015, “Anaphylaxis to the Carbohydrate Side-Chain Alpha-gal” Immunol Allergy Clin North Am. 35(2): 247-260.

[0639] Benefits of N-Glycosylation

[0640] N-glycosylation confers numerous benefits on the HuPTM mAb, HuGlyFab or HuPTM scFv described herein. Such benefits are unattainable by production of antigen-binding fragments in E. coli, because E. coli does not naturally possess components needed for N-glycosylation. Further, some benefits are unattainable through antibody production in, e.g., CHO cells (or murine cells such as NS0 cells), because CHO cells lack components needed for addition of certain glycans (e.g., 2,6 sialic acid and bisecting GlcNAc) and because either CHO or murine cell lines add N—N-Glycolylneuraminic acid (“Neu5Gc” or “NeuGc”) which is not natural to humans (and potentially immunogenic), instead of N-Acetylneuraminic acid (“Neu5Ac”) the predominant human sialic acid. See, e.g., Dumont et al., 2015, Crit. Rev. Biotechnol. 36(6):1110-1122; Huang et al., 2006, Anal. Biochem. 349:197-207 (NeuGc is the predominant sialic acid in murine cell lines such as SP2/0 and NS0); and Song et al., 2014, Anal. Chem. 86:5661-5666, each of which is incorporated by reference herein in its entirety). Moreover, CHO cells can also produce an immunogenic glycan, the α-Gal antigen, which reacts with anti-α-Gal antibodies present in most individuals, which at high concentrations can trigger anaphylaxis. See, e.g., Bosques, 2010, Nat. Biotech. 28:1153-1156. The human glycosylation pattern of the HuGlyFab of HuPTM scFv described herein should reduce immunogenicity of the transgene product and improve efficacy.

[0641] While non-canonical glycosylation sites usually result in low level glycosylation (e.g., 1-5%) of the antibody population, the functional benefits may be significant (See, e.g., van de Bovenkamp et al., 2016, J. Immunol. 196:1435-1441). For example, Fab glycosylation may affect the stability, half-life, and binding characteristics of an antibody. To determine the effects of Fab glycosylation on the affinity of the antibody for its target, any technique known to one of skill in the art may be used, for example, enzyme linked immunosorbent assay (ELISA), or surface plasmon resonance (SPR). To determine the effects of Fab glycosylation on the half-life of the antibody, any technique known to one of skill in the art may be used, for example, by measurement of the levels of radioactivity in the blood or organs in a subject to whom a radiolabelled antibody has been administered. To determine the effects of Fab glycosylation on the stability, for example, levels of aggregation or protein unfolding, of the antibody, any technique known to one of skill in the art may be used, for example, differential scanning calorimetry (DSC), high performance liquid chromatography (HPLC), e.g., size exclusion high performance liquid chromatography (SEC-HPLC), capillary electrophoresis, mass spectrometry, or turbidity measurement.

[0642] The presence of sialic acid on HuPTM mAb, HuGlyFab or HuPTM scFv used in the methods described herein can impact clearance rate of the HuPTM mAb, HuGlyFab or HuPTM scFv. Accordingly, sialic acid patterns of a HuPTM mAb, HuGlyFab or HuPTM scFv can be used to generate a therapeutic having an optimized clearance rate. Methods of assessing antigen-binding fragment clearance rate are known in the art. See, e.g., Huang et al., 2006, Anal. Biochem. 349:197-207.

[0643] In another specific embodiment, a benefit conferred by N-glycosylation is reduced aggregation. Occupied N-glycosylation sites can mask aggregation prone amino acid residues, resulting in decreased aggregation. Such N-glycosylation sites can be native to an antigen-binding fragment used herein or engineered into an antigen-binding fragment used herein, resulting in HuGlyFab or HuPTM scFv that is less prone to aggregation when expressed, e.g., expressed in human cells. Methods of assessing aggregation of antibodies are known in the art. See, e.g., Courtois et al., 2016, mAbs 8:99-112 which is incorporated by reference herein in its entirety.

[0644] In another specific embodiment, a benefit conferred by N-glycosylation is reduced immunogenicity. Such N-glycosylation sites can be native to an antigen-binding fragment used herein or engineered into an antigen-binding fragment used herein, resulting in HuPTM mAb, HuGlyFab or HuPTM scFv that is less prone to immunogenicity when expressed, e.g., expressed in human retinal cells, human CNS cells, human liver cells or human muscle cells.

[0645] In another specific embodiment, a benefit conferred by N-glycosylation is protein stability. N-glycosylation of proteins is well-known to confer stability on them, and methods of assessing protein stability resulting from N-glycosylation are known in the art. See, e.g., Sola and Griebenow, 2009, J Pharm Sci., 98(4): 1223-1245.

[0646] In another specific embodiment, a benefit conferred by N-glycosylation is altered binding affinity. It is known in the art that the presence of N-glycosylation sites in the variable domains of an antibody can increase the affinity of the antibody for its antigen. See, e.g., Bovenkamp et al., 2016, J. Immunol. 196:1435-1441. Assays for measuring antibody binding affinity are known in the art. See, e.g., Wright et al., 1991, EMBO J. 10:2717-2723; and Leibiger et al., 1999, Biochem. J. 338:529-538.

### 5.2.2 Tyrosine Sulfation

[0647] Tyrosine sulfation occurs at tyrosine (Y) residues with glutamate (E) or aspartate (D) within +5 to −5 position of Y, and where position −1 of Y is a neutral or acidic charged amino acid, but not a basic amino acid, e.g., arginine (R), lysine (K), or histidine (H) that abolishes sulfation. The HuGlyFabs and HuPTM scFvs described herein comprise tyrosine sulfation sites (see FIGS. 2A-2C, 3, 4A-4C, 5, 6A-6C, 7A-7B, 8A-8C, 9A-9C, 10A-10D, 11, 12A-12C, 13, 14A-14B, 15, 16A-16I, 17, 18, 19, and 29A-29F).

[0648] Importantly, tyrosine-sulfated antigen-binding fragments cannot be produced in E. coli, which naturally does not possess the enzymes required for tyrosine-sulfation. Further, CHO cells are deficient for tyrosine sulfation—they are not secretory cells and have a limited capacity for post-translational tyrosine-sulfation. See, e.g., Mikkelsen & Ezban, 1991, Biochemistry 30: 1533-1537. Advantageously, the methods provided herein call for expression of HuPTM Fab in human cells that are secretory and have capacity for tyrosine sulfation.

[0649] Tyrosine sulfation is advantageous for several reasons. For example, tyrosine-sulfation of the antigen-binding fragment of therapeutic antibodies against targets has been shown to dramatically increase avidity for antigen and activity. See, e.g., Loos et al., 2015, PNAS 112: 12675-12680, and Choe et al., 2003, Cell 114: 161-170. Assays for detection tyrosine sulfation are known in the art. See, e.g., Yang et al., 2015, Molecules 20:2138-2164.

### 5.2.3 O-Glycosylation

[0650] O-glycosylation comprises the addition of N-acetyl-galactosamine to serine or threonine residues by the enzyme. It has been demonstrated that amino acid residues present in the hinge region of antibodies can be O-glycosylated. In certain embodiments, the HuGlyFab comprise all or a portion of their hinge region, and thus are capable of being O-glycosylated when expressed in human cells. The possibility of O-glycosylation confers another advantage to the HuGlyFab provided herein, as compared to, e.g., antigen-binding fragments produced in E. coli, again because the E. coli naturally does not contain machinery equivalent to that used in human O-glycosylation. (Instead, O-glycosylation in E. coli has been demonstrated only when the bacteria is modified to contain specific O-glycosylation machinery. See, e.g., Farid-Moayer et al., 2007, J. Bacteriol. 189:8088-8098.) O-glycosylated HuGlyFab, by virtue of possessing glycans, shares advantageous characteristics with N-glycosylated HuGlyFab (as discussed above).

### 5.3 Vectored Therapeutic Antibodies

### 5.3.1 Anti-ABeta HuPTM Constructs and Formulations for Alzheimer's Disease

[0651] Compositions and methods are described for the delivery of HuPTM mAbs and antigen-binding fragments thereof, such as HuPTM Fabs, that bind to amyloid beta (Aβ or Abeta) peptides derived from the amyloid precursor protein that may have benefit in treating Alzheimer's disease (AD) and the like. In particular embodiments, the HuPTM mAb is solanezumab, or GSK933776, or lecanemab, or an antigen binding fragment of one of the foregoing. The amino acid sequences of Fab fragments of these antibodies are provided in FIGS. 2A-C, respectively. Delivery may be accomplished via gene therapy—e.g., by administering a viral vector or other DNA expression construct encoding an Aβ-binding HuPTM mAb (or an antigen binding fragment and/or a hyperglycosylated derivative or other derivative, thereof) to patients (human subjects) diagnosed with, or having one or more symptoms of, AD, to create a permanent depot that continuously supplies the human PTM, e.g., human-glycosylated, transgene product.

[0652] Transgenes

[0653] Provided are recombinant vectors containing a transgene encoding a HuPTM mAb or HuPTM Fab (or other antigen binding fragment of the HuPTM mAb) that binds to Aβ that can be administered to deliver the HuPTM mAb or antigen binding fragment in a patient. The transgene is a nucleic acid comprising the nucleotide sequences encoding an antigen binding fragment of an antibody that binds to Aβ, such as solanezumab, lecanemab, or GSK933776, or variants there of as detailed herein. The transgene may also encode an anti-Aβ antigen binding fragment that contains additional glycosylation sites (e.g., see Courtois et al., 2016, mAbs 8: 99-112 which is incorporated by reference herein in its entirety).

[0654] In certain embodiments, the anti-Aβ antigen-binding fragment transgene comprises the nucleotide sequences encoding the heavy and light chains of the Fab portion of solanezumab (having amino acid sequences of SEQ ID NOs. 1 and 2, respectively, see Table 5 and FIG. 2A). The nucleotide sequences may be codon optimized for expression in human cells. The nucleotide sequences may, for example, comprise the nucleotide sequences of SEQ ID NO: 71 (encoding the solanezumab heavy chain Fab portion) and SEQ ID NO: 72 (encoding the solanezumab light chain Fab portion) as set forth in Table 6. The heavy and light chain sequences both have a signal or leader sequence at the N-terminus appropriate for expression and secretion in human cells, in particular, human CNS cells. The signal sequence may have the amino acid sequence of MYRMQLLLLIALSLALVTNS (SEQ ID NO: 146) or the one of the sequences found in Table 2 supra.

[0655] In addition to the Fab fragments, including the heavy and light chain variable domain sequences and C_{L} and C_{H}1 sequences, the transgenes may comprise, at the C-terminus of the heavy chain C_{H}1 sequence, all or a portion of the hinge region. In specific embodiments, the anti-Aβ-antigen binding domain has a heavy chain variable domain and C_{H}1 domain of SEQ ID NO: 1 with additional hinge region sequence starting after the C-terminal valine (V), contains all or a portion of the amino acid sequence EPKSCDKTHTCPPCPAPELLGG (SEQ ID NO: 194), and specifically, EPKSCDKTHL (SEQ ID NO: 196), EPKSCDKTHT (SEQ ID NO: 197), EPKSCDKTHTCPPCPA (SEQ ID NO: 198), EPKSCDKTHLCPPCPA (SEQ ID NO: 199), EPKSCDKTHTCPPCPAPELLGGPSVFL (SEQ ID NO: 200) or EPKSCDKTHLCPPCPAPELLGGPSVFL (SEQ ID NO: 201) as set forth in FIG. 2A. These hinge regions may be encoded by nucleotide sequences at the 3′ end of SEQ ID NO: 71 by the hinge region encoding sequences set forth in Table 5 (SEQ ID NO: 71). In another embodiment, the transgenes comprise the amino acid sequences encoding the full length (or substantially full length) heavy and light chains of the antibody, comprising the Fc domain at the C terminus of the heavy chain, e.g. an IgG1 Fc domain, such as SEQ ID NO: 290 of Table 7, SEQ ID No. 283 or as depicted in FIG. 23, or a mutant or variant thereof. The Fc domain may be engineered for altered binding to one or more Fc receptors and/or effector function as disclosed in Section 5.1.9, infra.

[0656] In certain embodiments, the anti-Aβ antigen-binding fragment transgene encodes an Aβ antigen-binding fragment comprising a light chain comprising an amino acid sequence that is at least 85%, 86%, 87%, 88%, 89%, 90%, 91%, 92%, 93%, 94%, 95%, 96%, 97%, 98% or 99% identical to the sequence set forth in SEQ ID NO: 2. In certain embodiments, the anti-Aβ antigen-binding fragment transgene encodes an Aβ antigen-binding fragment comprising a heavy chain comprising an amino acid sequence that is at least 85%, 86%, 87%, 88%, 89%, 90%, 91%, 92%, 93%, 94%, 95%, 96%, 97%, 98% or 99% identical to the sequence set forth in SEQ ID NO: 1. In certain embodiments, the anti-Aβ antigen-binding fragment transgene encodes an antigen-binding fragment comprising a light chain comprising an amino acid sequence that is at least 85%, 86%, 87%, 88%, 89%, 90%, 91%, 92%, 93%, 94%, 95%, 96%, 97%, 98% or 99% identical to the sequence set forth in SEQ ID NO: 2 and a heavy chain comprising an amino acid sequence that is at least 85%, 86%, 87%, 88%, 89%, 90%, 91%, 92%, 93%, 94%, 95%, 96%, 97%, 98% or 99% identical to the sequence set forth in SEQ ID NO: 1. In specific embodiments, the Aβ antigen binding fragment comprises a heavy chain comprising an amino acid sequence of SEQ ID NO: 1 with 1, 2, 3, 4, 5, 6, 7, 8, 9, 10, 11, 12, 13, 14, 15 or more amino acid substitutions, insertions or deletions, and the substitutions, insertions or deletions are made for example, in the framework regions (e.g., those regions outside of the CDRs, which CDRs are underlined in FIG. 2A) or are substitutions with an amino acid present at that position in the heavy chain of one or more of the other therapeutic antibodies, for example, as identified by the alignment in FIG. 20A. In specific embodiments, the Aβ antigen binding fragment comprises a light chain comprising an amino acid sequence of SEQ ID NO: 2 with 1, 2, 3, 4, 5, 6, 7, 8, 9, 10, 11, 12, 13, 14, 15 or more amino acid substitutions, insertions or deletions, and the substitutions, insertions or deletions are made for example, in the framework regions (e.g., those regions outside of the CDRs, which CDRs are underlined in FIG. 2A) or are substitutions with an amino acid present at that position in the light chain of one or more of the other therapeutic antibodies, for example, as identified by the alignment in FIG. 20B.

[0657] In certain embodiments, the anti-Aβ antigen-binding fragment transgene encodes a hyperglycosylated solanezumab Fab, comprising a heavy chain and a light chain of SEQ ID NOs: 1 and 2, respectively, with one or more of the following mutations: L107N (heavy chain), Q165N or Q165S (light chain), and/or E200N (light chain) (see FIG. 20A (heavy chain) and B (light chain)).

[0658] In certain embodiments, the anti-Aβ antigen-binding fragment transgene encodes an antigen-binding fragment and comprises the nucleotide sequences encoding the six solanezumab CDRs which are underlined in the heavy and light chain variable domain sequences of FIG. 2A which are spaced between framework regions, generally human framework regions, and associated with constant domains depending upon the form of the antigen-binding molecule, as is known in the art to form the heavy and/or light chain variable domain of an anti-Aβ antibody or antigen-binding fragment thereof.

[0659] In certain embodiments, the anti-Aβ antigen-binding fragment transgene comprises the nucleotide sequences encoding the heavy and light chains of the Fab portion of GSK933776 (having amino acid sequences of SEQ ID NOs. 3 and 4, respectively, see Table 5 and FIG. 2B). The nucleotide sequences may be codon optimized for expression in human cells. Nucleotide sequences may, for example, comprise the nucleotide sequences of SEQ ID NO: 73 (encoding the GSK933776 heavy chain Fab portion) and SEQ ID NO: 74 (encoding the GSK933776 light chain Fab portion) as set forth in Table 6. The heavy and light chain sequences both have a signal or leader sequence at the N-terminus appropriate for expression and secretion in human cells, in particular, human CNS cells. The signal sequence may have the amino acid sequence of MYRMQLLLLIALSLALVTNS (SEQ ID NO: 146) or a signal sequence found in Table 2.

[0660] In addition to the heavy and light chain variable domain and C_{H}1 and C_{L} sequences, the transgenes may comprise, at the C-terminus of the heavy chain C_{H}1 sequence, all or a portion of the hinge region. In specific embodiments, the anti-Aβ-antigen binding domain has a heavy chain Fab domain of SEQ ID NO: 3 with additional hinge region sequence starting after the C-terminal valine (V), contains all or a portion of the amino acid sequence EPKSCDKTHTCPPCPAPELAGA (SEQ ID NO: 202), and specifically, EPKSCDKTHL (SEQ ID NO: 196), EPKSCDKTHT (SEQ ID NO: 197), EPKSCDKTHTCPPCPA (SEQ ID NO: 198), EPKSCDKTHLCPPCPA (SEQ ID NO: 199), EPKSCDKTHTCPPCPAPELAGAPSVFL (SEQ ID NO: 204) or EPKSCDKTHLCPPCPAPELAGAPSVFL (SEQ ID NO: 205) as set forth in FIG. 2B. These hinge regions may be encoded by nucleotide sequences at the 3′ end of SEQ ID NO: 3 by the hinge region encoding sequences set forth in Table 6 (SEQ ID NO: 73). In another embodiment, the transgenes comprise the amino acid sequences encoding the full length (or substantially full length) heavy and light chains of the antibody, comprising the Fc domain at the C terminus of the heavy chain, e.g., an IgG1 Fc domain, such as SEQ ID NO. 291 (Table 7), or alternatively, SEQ ID No. 283 or as depicted in FIG. 23, or a mutant or variant thereof. In particular embodiments, the Fc domain has alanine substitutions at positions 235 and 237 (EU numbering). The Fc domain may be engineered for altered binding to one or more Fc receptors and/or effector function as disclosed in Section 5.1.9, infra.

[0661] In certain embodiments, the anti-Aβ antigen-binding fragment transgene encodes an Aβ antigen-binding fragment comprising a light chain comprising an amino acid sequence that is at least 85%, 86%, 87%, 88%, 89%, 90%, 91%, 92%, 93%, 94%, 95%, 96%, 97%, 98% or 99% identical to the sequence set forth in SEQ ID NO: 4. In certain embodiments, the anti-Aβ antigen-binding fragment transgene encodes an Aβ antigen-binding fragment comprising a heavy chain comprising an amino acid sequence that is at least 85%, 86%, 87%, 88%, 89%, 90%, 91%, 92%, 93%, 94%, 95%, 96%, 97%, 98% or 99% identical to the sequence set forth in SEQ ID NO: 3. In certain embodiments, the anti-Aβ antigen-binding fragment transgene encodes an antigen-binding fragment comprising a light chain comprising an amino acid sequence that is at least 85%, 86%, 87%, 88%, 89%, 90%, 91%, 92%, 93%, 94%, 95%, 96%, 97%, 98% or 99% identical to the sequence set forth in SEQ ID NO: 4 and a heavy chain comprising an amino acid sequence that is at least 85%, 86%, 87%, 88%, 89%, 90%, 91%, 92%, 93%, 94%, 95%, 96%, 97%, 98% or 99% identical to the sequence set forth in SEQ ID NO: 3. In specific embodiments, the Aβ antigen binding fragment comprises a heavy chain comprising an amino acid sequence of SEQ ID NO: 3 with 1, 2, 3, 4, 5, 6, 7, 8, 9, 10, 11, 12, 13, 14, 15 or more amino acid substitutions, insertions or deletions, and the substitutions, insertions or deletions, e.g., are made in the framework regions (e.g., those regions outside of the CDRs, which CDRs are underlined in FIG. 2B) or are substitutions with an amino acid present at that position in the heavy chain of one or more of the other therapeutic antibodies, for example, as identified by the alignment in FIG. 20A. In specific embodiments, the Aβ antigen binding fragment comprises a light chain comprising an amino acid sequence of SEQ ID NO: 4 with 1, 2, 3, 4, 5, 6, 7, 8, 9, 10, 11, 12, 13, 14, 15 or more amino acid substitutions, insertions or deletions, and the substitutions, insertions or deletions are made, e.g., in the framework regions (e.g., those regions outside of the CDRs, which CDRs are underlined in FIG. 2B) or are substitutions with an amino acid present at that position in the light chain of one or more of the other therapeutic antibodies, for example, as identified by the alignment in FIG. 20B.

[0662] In certain embodiments, the anti-Aβ antigen-binding fragment transgene encodes a hyperglycosylated GSK933776 Fab, comprising a heavy chain and a light chain of SEQ ID NOs: 3 and 4, respectively, with one or more of the following mutations: L110N (heavy chain), Q165N or Q165S (light chain), and/or E200N (light chain) (see FIG. 20A (heavy chain) and B (light chain)).

[0663] In certain embodiments, the anti-Aβ antigen-binding fragment transgene encodes an antigen-binding fragment and comprises the nucleotide sequences encoding the six GSK933776 CDRs which are underlined in the heavy and light chain variable domain sequences of FIG. 2B which are spaced between framework regions, generally human framework regions, and associated with constant domains depending upon the form of the antigen-binding molecule, as is known in the art to form the heavy and/or light chain variable domain of an anti-Aβ antibody or antigen-binding fragment thereof.

[0664] In certain embodiments, the anti-Aβ antigen-binding fragment transgene comprises the nucleotide sequences encoding the heavy and light chains of the Fab portion of lecanemab (having amino acid sequences of SEQ ID NOs. 360 and 361, respectively, see Table 5 and FIG. 2C). The nucleotide sequences may be codon optimized for expression in human cells. Nucleotide sequences may, for example, comprise the nucleotide sequences of SEQ ID NO: 376 (encoding the lecanemab heavy chain Fab portion) and SEQ ID NO: 377 (encoding the lecanemab light chain Fab portion) as set forth in Table 6. The heavy and light chain sequences both have a signal or leader sequence at the N-terminus appropriate for expression and secretion in human cells, in particular, human CNS cells. The signal sequence may have the amino acid sequence of MYRMQLLLLIALSLALVTNS (SEQ ID NO: 146) or the one of the sequences found in Table 2 supra.

[0665] In addition to the Fab fragments, including the heavy and light chain variable domain sequences and the C_{L} and C_{H}1 domains, the transgenes may comprise, at the C-terminus of the heavy chain C_{H}1 sequence, all or a portion of the hinge region. In specific embodiments, the anti-Aβ-antigen binding domain has a heavy chain variable domain and C_{H}1 domain of SEQ ID NO: 360 with additional hinge region sequence starting after the C-terminal valine (V), contains all or a portion of the amino acid sequence EPKSCDKTHTCPPCPAPELLGG (SEQ ID NO: 194), and specifically, EPKSCDKTHL (SEQ ID NO: 196), EPKSCDKTHT (SEQ ID NO: 197), EPKSCDKTHTCPPCPA (SEQ ID NO: 198), EPKSCDKTHLCPPCPA (SEQ ID NO: 199), EPKSCDKTHTCPPCPAPELLGG (SEQ ID NO: 200) or EPKSCDKTHLCPPCPAPELLGGPSVFL (SEQ ID NO: 201) as set forth in FIG. 2C. These hinge regions may be encoded by nucleotide sequences at the 3′ end of SEQ ID NO: 376 by the hinge region encoding sequences set forth in Table 6 (SEQ ID NO: 376). In another embodiment, the transgenes comprise the amino acid sequences encoding the full length (or substantially full length) heavy and light chains of the antibody, comprising the Fc domain at the C terminus of the heavy chain, e.g. an IgG1 Fc domain, such as SEQ ID NO: 392 of Table 7, SEQ ID No. 283 or as depicted in FIG. 23, or a mutant or variant thereof. The Fc domain may be engineered for altered binding to one or more Fc receptors and/or effector function as disclosed in Section 5.1.9, infra.

[0666] In certain embodiments, the anti-Aβ antigen-binding fragment transgene encodes an Aβ antigen-binding fragment comprising a light chain comprising an amino acid sequence that is at least 85%, 86%, 87%, 88%, 89%, 90%, 91%, 92%, 93%, 94%, 95%, 96%, 97%, 98% or 99% identical to the sequence set forth in SEQ ID NO: 361. In certain embodiments, the anti-Aβ antigen-binding fragment transgene encodes an Aβ antigen-binding fragment comprising a heavy chain comprising an amino acid sequence that is at least 85%, 86%, 87%, 88%, 89%, 90%, 91%, 92%, 93%, 94%, 95%, 96%, 97%, 98% or 99% identical to the sequence set forth in SEQ ID NO: 360. In certain embodiments, the anti-Aβ antigen-binding fragment transgene encodes an antigen-binding fragment comprising a light chain comprising an amino acid sequence that is at least 85%, 86%, 87%, 88%, 89%, 90%, 91%, 92%, 93%, 94%, 95%, 96%, 97%, 98% or 99% identical to the sequence set forth in SEQ ID NO: 361 and a heavy chain comprising an amino acid sequence that is at least 85%, 86%, 87%, 88%, 89%, 90%, 91%, 92%, 93%, 94%, 95%, 96%, 97%, 98% or 99% identical to the sequence set forth in SEQ ID NO: 360. In specific embodiments, the Aβ antigen binding fragment comprises a heavy chain comprising an amino acid sequence of SEQ ID NO: 360 with 1, 2, 3, 4, 5, 6, 7, 8, 9, 10, 11, 12, 13, 14, 15 or more amino acid substitutions, insertions or deletions, and the substitutions, insertions or deletions are made for example, in the framework regions (e.g., those regions outside of the CDRs, which CDRs are underlined in FIG. 2C) or are substitutions with an amino acid present at that position in the heavy chain of one or more of the other therapeutic antibodies, for example, as identified by the alignment in FIG. 20A. In specific embodiments, the Aβ antigen binding fragment comprises a light chain comprising an amino acid sequence of SEQ ID NO: 361 with 1, 2, 3, 4, 5, 6, 7, 8, 9, 10, 11, 12, 13, 14, 15 or more amino acid substitutions, insertions or deletions, and the substitutions, insertions or deletions are made for example, in the framework regions (e.g., those regions outside of the CDRs, which CDRs are underlined in FIG. 2C) or are substitutions with an amino acid present at that position in the light chain of one or more of the other therapeutic antibodies, for example, as identified by the alignment in FIG. 20B.

[0667] In certain embodiments, the anti-Aβ antigen-binding fragment transgene encodes a hyperglycosylated lecanemab Fab, comprising a heavy chain and a light chain of SEQ ID NOs: 360 and 361, respectively, with one or more of the following mutations: T119N (heavy chain), Q165N or Q165S (light chain), and/or E200N (light chain) (see FIG. 20A (heavy chain) and B (light chain)).

[0668] In certain embodiments, the anti-Aβ antigen-binding fragment transgene encodes an antigen-binding fragment and comprises the nucleotide sequences encoding the six lecanemab CDRs which are underlined in the heavy and light chain variable domain sequences of FIG. 2C which are spaced between framework regions, generally human framework regions, and associated with constant domains depending upon the form of the antigen-binding molecule, as is known in the art to form the heavy and/or light chain variable domain of an anti-Aβ antibody or antigen-binding fragment thereof.

[0669] Gene Therapy Methods

[0670] Provided are methods of treating human subjects for AD by administration of a viral vector containing a transgene encoding an anti-Aβ antibody, or antigen binding fragment thereof. The antibody may be solanezumab, lecanemab, or GSK933776 and is, e.g., a Fab fragment thereof, or other antigen-binding fragment thereof. In other embodiments, the antibody is a full-length or substantially full-length antibody having an Fc region. In certain embodiments, the patient has been diagnosed with and/or has symptoms associated with prodromal AD, e.g., a mild cognitive impairment associated with early AD or even pre-AD. Recombinant vectors used for delivering the transgene are described in Section 5.4.1. Such vectors should have a tropism for human CNS cells and can include non-replicating rAAV, particularly those bearing an AAV9, AAVrh10, AAVrh20, AAVrh39, or AAVcy5 capsid. The recombinant vectors can be administered in any manner such that the recombinant vector enters the CNS, e.g., by introducing the recombinant vector into the cerebral spinal fluid (CSF). See Section 5.5.1 for details regarding the methods of treatment.

[0671] Subjects to whom such gene therapy is administered can be those responsive to anti-Aβ therapy. In particular embodiments, the methods encompass treating patients who have been diagnosed with AD, or have one or more symptoms associated therewith, and identified as responsive to treatment with an anti-Aβ antibody or considered a good candidate for therapy with an anti-Aβ antibody. In specific embodiments, the patients have previously been treated with solanezumab, lecanemab, or GSK933776 and have been found to be responsive to solanezumab, lecanemab, and/or GSK933776. To determine responsiveness, the anti-Aβ antibody or antigen-binding fragment transgene product (e.g., produced in human cell culture, bioreactors, etc.) may be administered directly to the subject.

[0672] Human Post Translationally Modified Antibodies

[0673] The production of the anti-Aβ HuPTM mAb or HuPTM Fab, should result in a “biobetter” molecule for the treatment of AD accomplished via gene therapy—e.g., by administering a viral vector or other DNA expression construct encoding the anti-Aβ HuPTM Fab or HuPTM mAb, intrathecally, particularly intracisternal or lumbar administration, or intravenous administration to human subjects (patients) diagnosed with or having one or more symptoms of AD, to create a permanent depot in the CNS that continuously supplies the fully-human post-translationally modified, e.g., human-glycosylated, sulfated transgene product produced by transduced CNS cells.

[0674] The cDNA construct for the anti-Aβ HuPTMmAb or anti-An HuPTM Fab should include a signal peptide that ensures proper co- and post-translational processing (glycosylation and protein sulfation) by the transduced CNS cells. For example, the signal sequence may be MYRMQLLLLIALSLALVTNS (SEQ ID NO: 146).

[0675] As an alternative, or an additional treatment to gene therapy, the anti-An HuPTM mAb or HuPTM Fab can be produced in human cell lines by recombinant DNA technology, and administered to patients diagnosed with AD, or for whom therapy for AD is considered appropriate.

[0676] In specific embodiments, the anti-An HuPTM mAb or antigen-binding fragment thereof has heavy and light chains with the amino acid sequences of the heavy and light chain Fab portions of solanezumab as set forth in FIG. 2A (with glutamine (Q) glycosylation sites; asparaginal (N) glycosylation sites, non-consensus asparaginal (N) glycosylation sites; and tyrosine-O-sulfation sites (Y) are as indicated in the legend) has glycosylation, particularly a 2,6-sialylation, at one or more of the amino acid positions N56, Q104, and/or N154 of the heavy chain (SEQ ID NO:1) or Q105, N163 and/or N215 of the light chain (SEQ ID NO: 2). Alternatively, or in addition to, the HuPTM mAb or antigen binding-fragment thereof with the heavy and light chain variable domain sequences of solanezumab has a sulfation group at Y94, Y95 and/or Y101 of the heavy chain (SEQ ID NO: 1) or Y91 and/or Y92 of the light chain (SEQ ID NO: 2). In other embodiments, the anti-Aβ HuPTM mAb or antigen-binding fragment thereof does not contain any detectable (e.g., as detected by assays known in the art, for example, those described in section 5.2, infra) NeuGc moieties and/or does not contain any detectable (e.g., as detected by assays known in the art, for example, those described in section 5.2, infra) alpha-Gal moieties. In certain embodiments, the anti-Aβ-HuPTM mAb is a full length mAb with an Fc region, e.g., the Fc domain of SEQ ID NO 290, or alternatively of SEQ ID NO: 283, SEQ ID NO: 284 or SEQ ID NO: 285, or a mutant or variant thereof.

[0677] In specific embodiments, the anti-An HuPTM mAb or antigen-binding fragment thereof has heavy and light chains with the amino acid sequences of the heavy and light chain Fab portions of GSK933776 as set forth in FIG. 2B (with glutamine (Q) glycosylation sites; asparaginal (N) glycosylation sites, non-consensus asparaginal (N) glycosylation sites; and tyrosine-O-sulfation sites (Y) are as indicated in the legend) has glycosylation, particularly a 2,6-sialylation, at one or more of the amino acid positions N32, Q107, and/or N157 of the heavy chain (SEQ ID NO: 3) or N163 and/or N215 of the light chain (SEQ ID NO: 4). Alternatively or in addition to, the HuPTM mAb or antigen binding-fragment thereof with the heavy and light chain variable domain sequences of GSK933776 has a sulfation group at Y94 and/or Y95 of the heavy chain (SEQ ID NO: 3) or Y91 and/or Y92 of the light chain (SEQ ID NO: 4). In other embodiments, the anti-Aβ HuPTM mAb or antigen-binding fragment thereof does not contain any detectable NeuGc moieties and/or does not contain any detectable alpha-Gal moieties. In certain embodiments, the anti-Aβ-HuPTM mAb is a full length mAb with an Fc region, e.g., the Fc domain of SEQ ID NO: 291, or alternatively SEQ ID NO: 283, SEQ ID NO: 284 or SEQ ID NO: 285, or a mutant or variant thereof, and, e.g., has alanine substitutions at positions 235 and 237 (EU numbering).

[0678] In specific embodiments, the anti-Aβ HuPTM mAb or antigen-binding fragment thereof has heavy and light chains with the amino acid sequences of the heavy and light chain Fab portions of lecanemab as set forth in FIG. 2C (with glutamine (Q) glycosylation sites; asparaginal (N) glycosylation sites, non-consensus asparaginal (N) glycosylation sites; and tyrosine-O-sulfation sites (Y) are as indicated in the legend) has glycosylation, particularly a 2,6-sialylation, at one or more of the amino acid positions Q116, and/or N166 of the heavy chain (SEQ ID NO: 360) or N163 and/or N215 of the light chain (SEQ ID NO: 361). Alternatively, or in addition to, the HuPTM mAb or antigen binding-fragment thereof with the heavy and light chain variable domain sequences of lecanemab has a sulfation group at Y94 and/or Y95 of the heavy chain (SEQ ID NO: 360) or Y91 and/or Y92 of the light chain (SEQ ID NO: 361). In other embodiments, the anti-Aβ HuPTM mAb or antigen-binding fragment thereof does not contain any detectable (e.g., as detected by assays known in the art, for example, those described in section 5.2, infra) NeuGc moieties and/or does not contain any detectable (e.g., as detected by assays known in the art, for example, those described in section 5.2, infra) alpha-Gal moieties. In certain embodiments, the anti-Aβ-HuPTM mAb is a full length mAb with an Fc region, e.g., the Fc domain of SEQ ID NO 392, or alternatively of SEQ ID NO: 283 or a mutant or variant thereof. In certain embodiments, the HuPTM mAb or Fab is therapeutically effective and is at least 0.5%, 1% or 2% 2,6 sialylated and/or sulfated and may be at least 5%, 10% or even 50% or 100% glycosylated 2,6 sialylation and/or sulfated. The goal of gene therapy treatment provided herein is to slow or arrest the progression of AD, particular cognitive impairment. Efficacy may be monitored by measuring a reduction in plaque formation and/or an improvement in cognitive function or a reduction in the decline in cognitive function.

[0679] Combinations of delivery of the anti-Aβ HuPTM mAb or antigen-binding fragment thereof, to the CNS accompanied by delivery of other available treatments are encompassed by the methods provided herein. The additional treatments may be administered before, concurrently or subsequent to the gene therapy treatment. Available treatments for AD that could be combined with the gene therapy provided herein include but are not limited to ARICEPT® (donepezil), RAZADYNE® (galantamine), NAMENDA® (rivastigmine), and NAMZARIC® (donepezil and memantine), to name a few, and administration with anti-Aβ agents, including but not limited to solanezumab, GSK933776, or lecanemab, or anti-Tau agents, such as aTAU.

### 5.3.2. Anti-Sortilin HuPTM Constructs and Formulations for Frontotemporal Dementia

[0680] Compositions and methods are described for the delivery of HuPTM mAbs and antigen-binding fragments thereof, such as HuPTM Fabs, that bind to sortilin that may have benefit in treating frontotemporal dementia (FD). In particular embodiments, the HuPTM mAb is AL-001, or an antigen binding fragment of AL-001. The amino acid sequences of the heavy and light chains of Fab fragments of this antibody is provided in FIG. 3. Delivery may be accomplished via gene therapy—e.g., by administering a viral vector or other DNA expression construct encoding a sortilin-binding HuPTM mAb (or an antigen binding fragment and/or a hyperglycosylated derivative or other derivative, thereof) to patients (human subjects) diagnosed with, or having one or more symptoms of, FD, to create a permanent depot that continuously supplies the human PTM, e.g., human-glycosylated, transgene product.

[0681] Transgenes

[0682] Provided are recombinant vectors containing a transgene encoding a HuPTM mAb or HuPTM Fab (or other antigen binding fragment of the HuPTM mAb) that binds to sortilin that can be administered to deliver the HuPTM mAb or antigen binding fragment in a patient. The transgene is a nucleic acid comprising the nucleotide sequences encoding an antigen binding fragment of an antibody that binds to sortilin, such as AL-001, or variants thereof as detailed herein. The transgene may also encode an anti-sortilin antigen binding fragment that contains additional glycosylation sites (e.g., see Courtois et al., 2016, mAbs 8: 99-112 which is incorporated by reference herein in its entirety).

[0683] In certain embodiments, the anti-sortilin antigen-binding fragment transgene comprises the nucleotide sequences encoding the heavy and light chains of the Fab portion of AL-001 (having amino acid sequences of SEQ ID NOs. 5 and 6, respectively, see Table 5 and FIG. 3). The nucleotide sequences may be codon optimized for expression in human cells. Nucleotide sequences may, for example, comprise the nucleotide sequences of SEQ ID NO: 75 (encoding the AL-001 heavy chain Fab portion) and SEQ ID NO: 76 (encoding the AL-001 light chain Fab portion) as set forth in Table 6. The heavy and light chain sequences both have a signal or leader sequence at the N-terminus appropriate for expression and secretion in human cells, in particular, human CNS cells. The signal sequence may have the amino acid sequence of MYRMQLLLLIALSLALVTNS (SEQ ID NO: 146) or the one of the sequences found in Table 2, supra.

[0684] In addition to the heavy and light chain variable domain sequences and the C_{H}1 and C_{L} domains, the transgenes may comprise, at the C-terminus sequence, all or a portion of the hinge region. In specific embodiments, the anti-sortilin-antigen binding domain has a heavy chain Fab domain of SEQ ID NO: 5 with additional hinge region sequence starting after the C-terminal valine (V), contains all or a portion of the amino acid sequence EPKSCDKTHTCPPCPAPELLGG (SEQ ID NO: 194), and specifically, EPKSCDKTHL (SEQ ID NO: 196), EPKSCDKTHT (SEQ ID NO: 197), EPKSCDKTHTCPPCPA (SEQ ID NO: 198), EPKSCDKTHLCPPCPA (SEQ ID NO: 199), EPKSCDKTHTCPPCPAPELLGGPSVFL (SEQ ID NO: 200) or EPKSCDKTHLCPPCPAPELLGGPSVFL (SEQ ID NO: 201) as set forth in FIG. 3. These hinge regions may be encoded by nucleotide sequences at the 3′ end of SEQ ID NO: 75 by the hinge region encoding sequences set forth in Table 6 (SEQ ID NO: 75). In another embodiment, the transgenes comprise the amino acid sequences encoding the full length (or substantially full length) heavy and light chains of the antibody, comprising the Fc domain at the C terminus of the heavy chain, e.g., an IgG1 Fc domain, such as SEQ ID No. 283 or as depicted in FIG. 23, or a mutant or variant thereof. The Fc domain may be engineered for altered binding to one or more Fc receptors and/or effector function as disclosed in Section 5.1.9, infra.

[0685] In certain embodiments, the anti-sortilin antigen-binding fragment transgene encodes an sortilin antigen-binding fragment comprising a light chain comprising an amino acid sequence that is at least 85%, 86%, 87%, 88%, 89%, 90%, 91%, 92%, 93%, 94%, 95%, 96%, 97%, 98% or 99% identical to the sequence set forth in SEQ ID NO: 6. In certain embodiments, the anti-sortilin antigen-binding fragment transgene encodes an sortilin antigen-binding fragment comprising a heavy chain comprising an amino acid sequence that is at least 85%, 86%, 87%, 88%, 89%, 90%, 91%, 92%, 93%, 94%, 95%, 96%, 97%, 98% or 99% identical to the sequence set forth in SEQ ID NO: 5. In certain embodiments, the anti-sortilin antigen-binding fragment transgene encodes an antigen-binding fragment comprising a light chain comprising an amino acid sequence that is at least 85%, 86%, 87%, 88%, 89%, 90%, 91%, 92%, 93%, 94%, 95%, 96%, 97%, 98% or 99% identical to the sequence set forth in SEQ ID NO: 6 and a heavy chain comprising an amino acid sequence that is at least 85%, 86%, 87%, 88%, 89%, 90%, 91%, 92%, 93%, 94%, 95%, 96%, 97%, 98% or 99% identical to the sequence set forth in SEQ ID NO: 5. In specific embodiments, the sortilin antigen binding fragment comprises a heavy chain comprising an amino acid sequence of SEQ ID NO: 5 with 1, 2, 3, 4, 5, 6, 7, 8, 9, 10, 11, 12, 13, 14, 15 or more amino acid substitutions, insertions or deletions, and the substitutions, insertions or deletions are made, for example, in the framework regions (e.g., those regions outside of the CDRs, which CDRs are underlined in FIG. 3) or are substitutions with an amino acid present at that position in the heavy chain of one or more of the other therapeutic antibodies, for example, as identified by the alignment in FIG. 20A. In specific embodiments, the sortilin antigen binding fragment comprises a light chain comprising an amino acid sequence of SEQ ID NO: 6 with 1, 2, 3, 4, 5, 6, 7, 8, 9, 10, 11, 12, 13, 14, 15 or more amino acid substitutions, insertions or deletions, and the substitutions, insertions or deletions are made, e.g., in the framework regions (e.g., those regions outside of the CDRs, which CDRs are underlined in FIG. 3) or are substitutions with an amino acid present at that position in the light chain of one or more of the other therapeutic antibodies, for example, as identified by the alignment in FIG. 20B.

[0686] In certain embodiments, the anti-sortilin antigen-binding fragment transgene encodes a hyperglycosylated AL-001 Fab or mAb, comprising a heavy chain and a light chain of SEQ ID NOs: 5 and 6, respectively, with one or more of the following mutations: T124N (heavy chain), Q160N or Q160S (light chain), and/or E199N (light chain) (see FIG. 20A (heavy chain) and B (light chain)).

[0687] In certain embodiments, the anti-sortilin antigen-binding fragment transgene encodes an antigen-binding fragment and comprises the nucleotide sequences encoding the six AL-001 CDRs which are underlined in the heavy and light chain variable domain sequences of FIG. 3 which are spaced between framework regions, generally human framework regions, and associated with constant domains depending upon the form of the antigen-binding molecule, as is known in the art to form the heavy and/or light chain variable domain of an anti-sortilin antibody or antigen-binding fragment thereof.

[0688] Gene Therapy Methods

[0689] Provided are methods of treating human subjects for FD by administration of a viral vector containing a transgene encoding an anti-sortilin antibody, or antigen binding fragment thereof. The antibody may be AL-001 and is, e.g., a Fab fragment thereof, or other antigen-binding fragment thereof. In certain embodiments, the transgene encodes a full length or substantially full-length Al-001 mAb, including the Fc region. In certain embodiments, the patient has been diagnosed with FD and/or has symptoms associated with FD or prodromal FD, e.g., a mild cognitive impairment associated with early FD or even pre-FD. Recombinant vectors used for delivering the transgene are described in Section 5.4.1. Such vectors should have a tropism for human CNS cells and can include non-replicating rAAV, particularly those bearing an AAV9, AAVrh10, AAVrh20, AAVrh39, or AAVcy5 capsid. The recombinant vectors can be administered in any manner such that the recombinant vector enters the CNS, e.g., by introducing the recombinant vector into the cerebral spinal fluid (CSF). See Section 5.5.1 for details regarding the methods of treatment.

[0690] Subjects to whom such gene therapy is administered can be those responsive to anti-sortilin therapy. In particular embodiments, the methods encompass treating patients who have been diagnosed with FD, or have one or more symptoms associated therewith, and identified as responsive to treatment with an anti-sortilin antibody or considered a good candidate for therapy with an anti-sortilin antibody. In specific embodiments, the patients have previously been treated with AL-001, and have been found to be responsive to AL-001. To determine responsiveness, the anti-sortilin antibody or antigen-binding fragment transgene product (e.g., produced in human cell culture, bioreactors, etc.) may be administered directly to the subject.

[0691] Human Post Translationally Modified Antibodies

[0692] The production of the anti-sortilin HuPTM mAb or HuPTM Fab, should result in a “biobetter” molecule for the treatment of FD accomplished via gene therapy—e.g., by administering a viral vector or other DNA expression construct encoding the anti-sortilin HuPTM Fab or HuPTM mAb, intrathecally, particularly intracisternal or lumbar administration, or intravenous administration to human subjects (patients) diagnosed with or having one or more symptoms of FD, to create a permanent depot in the CNS that continuously supplies the fully-human post-translationally modified, e.g., human-glycosylated, sulfated transgene product produced by transduced CNS cells.

[0693] The cDNA construct for the anti-sortilin HuPTM mAb or anti-sortilin HuPTM Fab should include a signal peptide that ensures proper co- and post-translational processing (glycosylation and protein sulfation) by the transduced CNS cells. For example, the signal sequence may be MYRMQLLLLIALSLALVTNS (SEQ ID NO: 146).

[0694] As an alternative, or an additional treatment to gene therapy, the anti-sortilin HuPTM mAb or HuPTM Fab can be produced in human cell lines by recombinant DNA technology, and administered to patients diagnosed with FD, or for whom therapy for FD is considered appropriate.

[0695] In specific embodiments, the anti-sortilin HuPTM mAb or antigen-binding fragment thereof has heavy and light chains with the amino acid sequences of the heavy and light chain Fab portions of AL-001 as set forth in FIG. 3 (with glutamine (Q) glycosylation sites; asparaginal (N) glycosylation sites, non-consensus asparaginal (N) glycosylation sites; and tyrosine-O-sulfation sites (Y) are as indicated in the legend) has glycosylation, particularly a 2,6-sialylation, at one or more of the amino acid positions Q121 and/or N171 of the heavy chain (SEQ ID NO:5) or N32, N158 and/or N210 of the light chain (SEQ ID NO: 6). Alternatively or in addition to, the HuPTM mAb or antigen binding-fragment thereof with the heavy and light chain variable domain sequences of AL-001 has a sulfation group at Y94 and/or Y95 of the heavy chain (SEQ ID NO: 5) or Y86 and/or Y87 of the light chain (SEQ ID NO: 6). In other embodiments, the anti-sortilin HuPTM mAb or antigen-binding fragment thereof does not contain any detectable (e.g., as detected by assays known in the art, for example, those described in section 5.2, infra) NeuGc moieties and/or does not contain any detectable (e.g., as detected by assays known in the art, for example, those described in section 5.2, infra) alpha-Gal moieties. In certain embodiments, the anti-sortilin-HuPTM mAb is a full length mAb with an Fc region, e.g., the Fc domain of SEQ ID NO: 283, SEQ ID NO: 284 or SEQ ID NO: 285, or a mutant or variant thereof.

[0696] In certain embodiments, the HuPTM mAb or Fab is therapeutically effective and is at least 0.5%, 1% or 2% 2,6 sialylated and/or sulfated and may be at least 5%, 10% or even 50% or 100% glycosylated 2,6 sialylation and/or sulfated. The goal of gene therapy treatment provided herein is to slow or arrest the progression of FD, particular cognitive impairment. Efficacy may be monitored by measuring an improvement in cognitive function and/or a reduction in the deterioration in behavior, personality and/or difficulty with producing or comprehending language.

[0697] Combinations of delivery of the anti-sortilin HuPTM mAb or antigen-binding fragment thereof, to the CNS accompanied by delivery of other available treatments are encompassed by the methods provided herein. The additional treatments may be administered before, concurrently or subsequent to the gene therapy treatment. Available treatments for FD that could be combined with the gene therapy provided herein.

### 5.3.3. Anti-Tau HuPTM Constructs and Formulations for Tauopathies Like Alzheimer's Disease, Chronic Traumatic Encephalopathy, Progressive Supranuclear Palsy, or Frontotemporal Dementia

[0698] Compositions and methods are described for the delivery of HuPTM mAbs and antigen-binding fragments thereof, such as HuPTM Fabs, that bind to Tau protein (Tau), such as monomeric Tau, oligomeric Tau, non-phosphorylated Tau, and phosphorylated Tau, that may have benefit in treating Alzheimer's Disease (AD), Chronic Traumatic Encephalopathy (CTE), Pick's Complex, primary age-related tauopathy, progressive supranuclear palsy (PSP), FD, and other tauopathies. In particular embodiments, the HuPTM mAb is ABBV-8E12, UCB-0107, and NI-105 (BIIB076), or an antigen binding fragment of one of the foregoing. The amino acid sequences of Fab fragments of these antibodies are provided in FIGS. 4A-C. Delivery may be accomplished via gene therapy—e.g., by administering a viral vector or other DNA expression construct encoding a Tau-binding HuPTM mAb (or an antigen binding fragment and/or a hyperglycosylated derivative or other derivative, thereof) to patients (human subjects) diagnosed with, or having one or more symptoms of, AD, CTE, PSP, FD, or other tauopathies, to create a permanent depot that continuously supplies the human PTM, e.g., human-glycosylated, transgene product.

[0699] Transgenes

[0700] Provided are recombinant vectors containing a transgene encoding a HuPTM mAb or HuPTM Fab (or other antigen binding fragment of the HuPTM mAb) that binds to Tau that can be administered to deliver the HuPTM mAb or antigen binding fragment in a patient. The transgene is a nucleic acid comprising the nucleotide sequences encoding an antigen binding fragment of an antibody that binds to Tau, such as ABBV-8E12, UCB-0107, and NI-105 (BIIB076), or variants there of as detailed herein. The transgene may also encode anti-Tau antigen binding fragment that contains additional glycosylation sites (e.g., see Courtois et al., 2016, mAbs 8: 99-112 which is incorporated by reference herein in its entirety).

[0701] In certain embodiments, the anti-Tau antigen-binding fragment transgene comprises the nucleotide sequences encoding the heavy and light chains of the Fab portion of ABBV-8E12 (having amino acid sequences of SEQ ID NOs. 7 and 8, respectively, see Table 5 and FIG. 4A). The nucleotide sequences may be codon optimized for expression in human cells. Nucleotide sequences may, for example, comprise the nucleotide sequences of SEQ ID NO: 77 (encoding the ABBV-8E12 heavy chain Fab portion) and SEQ ID NO: 78 (encoding the ABBV-8E12 light chain Fab portion) as set forth in Table 6. The heavy and light chain sequences both have a signal or leader sequence at the N-terminus appropriate for expression and secretion in human cells, in particular, human CNS cells. The signal sequence may have the amino acid sequence of MYRMQLLLLIALSLALVTNS (SEQ ID NO: 146) or the one of the sequences found in Table 2, supra.

[0702] In addition to the heavy and light chain variable domain and C_{H}1 and C_{L} sequences, the transgenes may comprise, at the C-terminus of the C_{H}1 domain, all or a portion of the hinge region. In specific embodiments, the anti-Tau-antigen binding domain has a heavy chain Fab domain of SEQ ID NO: 7 with additional hinge region sequence starting after the C-terminal tyrosine (Y), contains all or a portion of the amino acid sequence ESKYGPPCPPCPAPEFLGG (SEQ ID NO: 214), and specifically, ESKYGPPCPPCPA (SEQ ID NO: 216), ESKYGPPCPSCPA (SEQ ID NO: 217), ESKYGPPCPSCPAPEFLGGPSVFL (SEQ ID NO: 218), or ESKYGPPCPPCPAPEFLGGPSVFL (SEQ ID NO: 219) as set forth in FIG. 4A. These hinge regions may be encoded by nucleotide sequences at the 3′ end of SEQ ID NO: 77 by the hinge region encoding sequences set forth in Table 5 (SEQ ID NO: 77). In another embodiment, the transgenes comprise the amino acid sequences encoding the full length (or substantially full length) heavy and light chains of the antibody, comprising the Fc domain at the C terminus of the heavy chain, e.g., an IgG1 or IgG4 Fc domain, such as SEQ ID Nos. 283 or 285, including with a S241P substitution (EU numbering) or as depicted in FIG. 23, or a mutant or variant thereof. The Fc domain may be engineered for altered binding to one or more Fc receptors and/or effector function as disclosed in Section 5.1.9, infra.

[0703] In certain embodiments, the anti-Tau antigen-binding fragment transgene encodes a Tau antigen-binding fragment comprising a light chain comprising an amino acid sequence that is at least 85%, 86%, 87%, 88%, 89%, 90%, 91%, 92%, 93%, 94%, 95%, 96%, 97%, 98% or 99% identical to the sequence set forth in SEQ ID NO: 8. In certain embodiments, the anti-Tau antigen-binding fragment transgene encodes a Tau antigen-binding fragment comprising a heavy chain comprising an amino acid sequence that is at least 85%, 86%, 87%, 88%, 89%, 90%, 91%, 92%, 93%, 94%, 95%, 96%, 97%, 98% or 99% identical to the sequence set forth in SEQ ID NO: 7. In certain embodiments, the anti-Tau antigen-binding fragment transgene encodes an antigen-binding fragment comprising a light chain comprising an amino acid sequence that is at least 85%, 86%, 87%, 88%, 89%, 90%, 91%, 92%, 93%, 94%, 95%, 96%, 97%, 98% or 99% identical to the sequence set forth in SEQ ID NO: 8 and a heavy chain comprising an amino acid sequence that is at least 85%, 86%, 87%, 88%, 89%, 90%, 91%, 92%, 93%, 94%, 95%, 96%, 97%, 98% or 99% identical to the sequence set forth in SEQ ID NO: 7. In specific embodiments, the Tau antigen-binding fragment comprises a heavy chain comprising an amino acid sequence of SEQ ID NO: 7 with 1, 2, 3, 4, 5, 6, 7, 8, 9, 10, 11, 12, 13, 14, 15 or more amino acid substitutions, insertions or deletions, and the substitutions, insertions or deletions are made, e.g., in the framework regions (e.g., those regions outside of the CDRs, which CDRs are underlined in FIG. 4A) or are substitutions with an amino acid present at that position in the heavy chain of one or more of the other therapeutic antibodies, for example, as identified by the alignment in FIG. 20A. In specific embodiments, the Tau antigen binding fragment comprises a light chain comprising an amino acid sequence of SEQ ID NO: 8 with 1, 2, 3, 4, 5, 6, 7, 8, 9, 10, 11, 12, 13, 14, 15 or more amino acid substitutions, insertions or deletions, and the substitutions, insertions or deletions are made, e.g., in the framework regions (e.g., those regions outside of the CDRs, which CDRs are underlined in FIG. 4A) or are substitutions with an amino acid present at that position in the light chain of one or more of the other therapeutic antibodies, for example, as identified by the alignment in FIG. 20B.

[0704] In certain embodiments, the anti-Tau antigen-binding fragment transgene encodes a hyperglycosylated ABBV-8E12 Fab, comprising a heavy chain and a light chain of SEQ ID NOs: 7 and 8, respectively, with one or more of the following mutations: T110N (heavy chain), Q164N or Q164S (light chain), and/or E199N (light chain) (see FIG. 20A (heavy chain) and B (light chain)).

[0705] In certain embodiments, the anti-Tau antigen-binding fragment transgene encodes an antigen-binding fragment and comprises the nucleotide sequences encoding the six ABBV-8E12 CDRs which are underlined in the heavy and light chain variable domain sequences of FIG. 4A which are spaced between framework regions, generally human framework regions, and associated with constant domains depending upon the form of the antigen-binding molecule, as is known in the art to form the heavy and/or light chain variable domain of an anti-Tau antibody or antigen-binding fragment thereof.

[0706] In certain embodiments, the anti-Tau antigen-binding fragment transgene comprises the nucleotide sequences encoding the heavy and light chains of the Fab portion of UCB-0107 (having amino acid sequences of SEQ ID NOs. 9 and 10, respectively, see Table 5 and FIG. 4B). The nucleotide sequences may be codon optimized for expression in human cells. Nucleotide sequences may, for example, comprise the nucleotide sequences of SEQ ID NO: 79 (encoding the UCB-0107 heavy chain Fab portion) and SEQ ID NO: 80 (encoding the UCB-0107 light chain Fab portion) as set forth in Table 6. The heavy and light chain sequences both have a signal or leader sequence at the N-terminus appropriate for expression and secretion in human cells, in particular, human CNS cells. The signal sequence may have the amino acid sequence of MYRMQLLLLIALSLALVTNS (SEQ ID NO: 146) or the one of the sequences found in Table 2 supra.

[0707] In addition to the heavy and light chain variable domain, C_{H}1 and C_{L} domain sequences, the transgenes may comprise, at the C-terminus of the heavy chain C_{H}1 domain sequence, all or a portion of the hinge region. In specific embodiments, the anti-Tau-antigen binding domain has a heavy chain Fab fragment of SEQ ID NO: 9 with additional hinge region sequence starting after the C-terminal valine (V), contains all or a portion of the amino acid sequence ESKYGPPCPPCPAPEFLGG (SEQ ID NO: 214), and specifically, ESKYGPPCPPCPA (SEQ ID NO: 216), ESKYGPPCPSCPA (SEQ ID NO: 217), ESKYGPPCPSCPAPEFLGGPSVFL (SEQ ID NO: 218), or ESKYGPPCPPCPAPEFLGGPSVFL (SEQ ID NO: 219) as set forth in FIG. 4B. These hinge regions may be encoded by nucleotide sequences at the 3′ end of SEQ ID NO: 79 by the hinge region encoding sequences set forth in Table 5 (SEQ ID NO: 79). In another embodiment, the transgenes comprise the amino acid sequences encoding the full length (or substantially full length) heavy and light chains of the antibody, comprising the Fc domain at the C terminus of the heavy chain, e.g., SEQ ID NO. 292 (Table 7), or an IgG4 Fc domain, such as SEQ ID No. 285 or as depicted in FIG. 23, or a mutant or variant thereof. The Fc domain may be engineered for altered binding to one or more Fc receptors and/or effector function as disclosed in Section 5.1.9, infra.

[0708] In certain embodiments, the anti-Tau antigen-binding fragment transgene encodes a Tau antigen-binding fragment comprising a light chain comprising an amino acid sequence that is at least 85%, 86%, 87%, 88%, 89%, 90%, 91%, 92%, 93%, 94%, 95%, 96%, 97%, 98% or 99% identical to the sequence set forth in SEQ ID NO: 10. In certain embodiments, the anti-Tau antigen-binding fragment transgene encodes a Tau antigen-binding fragment comprising a heavy chain comprising an amino acid sequence that is at least 85%, 86%, 87%, 88%, 89%, 90%, 91%, 92%, 93%, 94%, 95%, 96%, 97%, 98% or 99% identical to the sequence set forth in SEQ ID NO: 9. In certain embodiments, the anti-Tau antigen-binding fragment transgene encodes an antigen-binding fragment comprising a light chain comprising an amino acid sequence that is at least 85%, 86%, 87%, 88%, 89%, 90%, 91%, 92%, 93%, 94%, 95%, 96%, 97%, 98% or 99% identical to the sequence set forth in SEQ ID NO: 10 and a heavy chain comprising an amino acid sequence that is at least 85%, 86%, 87%, 88%, 89%, 90%, 91%, 92%, 93%, 94%, 95%, 96%, 97%, 98% or 99% identical to the sequence set forth in SEQ ID NO: 9. In specific embodiments, the Tau antigen-binding fragment comprises a heavy chain comprising an amino acid sequence of SEQ ID NO: 9 with 1, 2, 3, 4, 5, 6, 7, 8, 9, 10, 11, 12, 13, 14, 15 or more amino acid substitutions, insertions or deletions, and the substitutions, insertions or deletions are made, e.g., in the framework regions (e.g., those regions outside of the CDRs, which CDRs are underlined in FIG. 4B) or are substitutions with an amino acid present at that position in the heavy chain of one or more of the other therapeutic antibodies, for example, as identified by the alignment in FIG. 20A. In specific embodiments, the Tau antigen binding fragment comprises a light chain comprising an amino acid sequence of SEQ ID NO: 10 with 1, 2, 3, 4, 5, 6, 7, 8, 9, 10, 11, 12, 13, 14, 15 or more amino acid substitutions, insertions or deletions, and the substitutions, insertions or deletions are made, e.g., in the framework regions (e.g., those regions outside of the CDRs, which CDRs are underlined in FIG. 4B) or are substitutions with an amino acid present at that position in the light chain of one or more of the other therapeutic antibodies, for example, as identified by the alignment in FIG. 20B.

[0709] In certain embodiments, the anti-Tau antigen-binding fragment transgene encodes a hyperglycosylated UCB-0107 Fab, comprising a heavy chain and a light chain of SEQ ID NOs: 9 and 10, respectively, with one or more of the following mutations: M113N (heavy chain), Q165N or Q165S (light chain), and/or E200N (light chain) (see FIG. 20A (heavy chain) and B (light chain)).

[0710] In certain embodiments, the anti-Tau antigen-binding fragment transgene encodes an antigen-binding fragment and comprises the nucleotide sequences encoding the six UCB-0107 CDRs which are underlined in the heavy and light chain variable domain sequences of FIG. 4B which are spaced between framework regions, generally human framework regions, and associated with constant domains depending upon the form of the antigen-binding molecule, as is known in the art to form the heavy and/or light chain variable domain of an anti-Tau antibody or antigen-binding fragment thereof.

[0711] In certain embodiments, the anti-Tau antigen-binding fragment transgene comprises the nucleotide sequences encoding the heavy and light chains of the Fab portion of NI-105 (having amino acid sequences of SEQ ID NOs. 11 and 12, respectively, see Table 5 and FIG. 4C). The nucleotide sequences may be codon optimized for expression in human cells. Nucleotide sequences may, for example, comprise the nucleotide sequences of SEQ ID NO: 81 (encoding the NI-105 heavy chain Fab portion) and SEQ ID NO: 82 (encoding the NI-105 light chain Fab portion) as set forth in Table 6. The heavy and light chain sequences both have a signal or leader sequence at the N-terminus appropriate for expression and secretion in human cells, in particular, human CNS cells. The signal sequence may have the amino acid sequence of MYRMQLLLLIALSLALVTNS (SEQ ID NO: 146) or the one of the sequences found in Table 2 supra.

[0712] In addition to the heavy and light chain variable domain and C_{H}1 and C_{L} sequences, the transgenes may comprise, at the C-terminus of the C_{H}1 domain sequence, all or a portion of the hinge region. In specific embodiments, the anti-Tau-antigen binding domain has a heavy chain Fab fragment of SEQ ID NO: 11 with additional hinge region sequence starting after the C-terminal valine (V), contains all or a portion of the amino acid sequence EPKSCDKTHTCPPCPAPELAGA (SEQ ID NO: 202), and specifically, EPKSCDKTHL (SEQ ID NO: 196), EPKSCDKTHT (SEQ ID NO: 197), EPKSCDKTHTCPPCPA (SEQ ID NO: 198), EPKSCDKTHLCPPCPA (SEQ ID NO: 199), EPKSCDKTHTCPPCPAPELAGAPSVFL (SEQ ID NO: 204) or EPKSCDKTHLCPPCPAPELAGAPSVFL (SEQ ID NO: 205) as set forth in FIG. 4C. These hinge regions may be encoded by nucleotide sequences at the 3′ end of SEQ ID NO: 81 by the hinge region encoding sequences set forth in Table 5 (SEQ ID NO: 81). In another embodiment, the transgenes comprise the amino acid sequences encoding the full length (or substantially full length) heavy and light chains of the antibody, comprising the Fc domain at the C terminus of the heavy chain, e.g., an IgG1 Fc domain, such as SEQ ID No. 283 or as depicted in FIG. 23, or a mutant or variant thereof. The Fc domain may be engineered for altered binding to one or more Fc receptors and/or effector function as disclosed in Section 5.1.9, infra.

[0713] In certain embodiments, the anti-Tau antigen-binding fragment transgene encodes a Tau antigen-binding fragment comprising a light chain comprising an amino acid sequence that is at least 85%, 86%, 87%, 88%, 89%, 90%, 91%, 92%, 93%, 94%, 95%, 96%, 97%, 98% or 99% identical to the sequence set forth in SEQ ID NO: 12. In certain embodiments, the anti-Tau antigen-binding fragment transgene encodes a Tau antigen-binding fragment comprising a heavy chain comprising an amino acid sequence that is at least 85%, 86%, 87%, 88%, 89%, 90%, 91%, 92%, 93%, 94%, 95%, 96%, 97%, 98% or 99% identical to the sequence set forth in SEQ ID NO: 11. In certain embodiments, the anti-Tau antigen-binding fragment transgene encodes an antigen-binding fragment comprising a light chain comprising an amino acid sequence that is at least 85%, 86%, 87%, 88%, 89%, 90%, 91%, 92%, 93%, 94%, 95%, 96%, 97%, 98% or 99% identical to the sequence set forth in SEQ ID NO: 12 and a heavy chain comprising an amino acid sequence that is at least 85%, 86%, 87%, 88%, 89%, 90%, 91%, 92%, 93%, 94%, 95%, 96%, 97%, 98% or 99% identical to the sequence set forth in SEQ ID NO: 11. In specific embodiments, the Tau antigen-binding fragment comprises a heavy chain comprising an amino acid sequence of SEQ ID NO: 11 with 1, 2, 3, 4, 5, 6, 7, 8, 9, 10, 11, 12, 13, 14, 15 or more amino acid substitutions, insertions or deletions, and the substitutions, insertions or deletions are made, e.g., in the framework regions (e.g., those regions outside of the CDRs, which CDRs are underlined in FIG. 4C) or are substitutions with an amino acid present at that position in the heavy chain of one or more of the other therapeutic antibodies, for example, as identified by the alignment in FIG. 20A. In specific embodiments, the Tau antigen binding fragment comprises a light chain comprising an amino acid sequence of SEQ ID NO: 12 with 1, 2, 3, 4, 5, 6, 7, 8, 9, 10, 11, 12, 13, 14, 15 or more amino acid substitutions, insertions or deletions, and the substitutions, insertions or deletions are made, e.g., in the framework regions (e.g., those regions outside of the CDRs, which CDRs are underlined in FIG. 4C) or are substitutions with an amino acid present at that position in the light chain of one or more of the other therapeutic antibodies, for example, as identified by the alignment in FIG. 20B.

[0714] In certain embodiments, the anti-Tau antigen-binding fragment transgene encodes a hyperglycosylated NI-105 Fab, comprising a heavy chain and a light chain of SEQ ID NOs: 11 and 12, respectively, with one or more of the following mutations: L119N (heavy chain) and/or Q196N (light chain) (see FIG. 20A (heavy chain) and B (light chain)).

[0715] In certain embodiments, the anti-Tau antigen-binding fragment transgene encodes an antigen-binding fragment and comprises the nucleotide sequences encoding the six NI-105 CDRs which are underlined in the heavy and light chain variable domain sequences of FIG. 4C which are spaced between framework regions, generally human framework regions, and associated with constant domains depending upon the form of the antigen-binding molecule, as is known in the art to form the heavy and/or light chain variable domain of an anti-Tau antibody or antigen-binding fragment thereof.

[0716] Gene Therapy Methods

[0717] Provided are methods of treating human subjects for AD, CTE, PSP, FD, or other tauopathies by administration of a viral vector containing a transgene encoding an anti-Tau antibody, or antigen binding fragment thereof. The antibody may be ABBV-8E12, UCB-0107, or NI-105 (BIIB076), and is, for example, a Fab fragment thereof, or other antigen-binding fragment thereof. In certain embodiments, the antibody is a full length or substantially full length mAb with Fc region. In certain embodiments, the patient has been diagnosed with and/or has symptoms associated with prodromal AD, e.g., a mild cognitive impairment associated with early AD or even pre-AD. Recombinant vectors used for delivering the transgene are described in Section 5.4.1. Such vectors should have a tropism for human CNS cells and can include non-replicating rAAV, particularly those bearing an AAV9, AAVrh10, AAVrh20, AAVrh39, or AAVcy5 capsid. The recombinant vectors can be administered in any manner such that the recombinant vector enters the CNS, e.g., by introducing the recombinant vector into the cerebral spinal fluid (CSF). See Section 5.5.1 for details regarding the methods of treatment.

[0718] Subjects to whom such gene therapy is administered can be those responsive to anti-Tau therapy. In particular embodiments, the methods encompass treating patients who have been diagnosed with AD, PSP, or FD, or have one or more symptoms associated therewith, and identified as responsive to treatment with an anti-Tau antibody or considered a good candidate for therapy with an anti-Tau antibody. In specific embodiments, the patients have previously been treated with ABBV-8E12, UCB-0107, and/or NI-105 (BIIB076), and have been found to be responsive to ABBV-8E12, UCB-0107, and/or NI-105 (BIIB076). To determine responsiveness, the anti-Tau antibody or antigen-binding fragment transgene product (e.g., produced in human cell culture, bioreactors, etc.) may be administered directly to the subject.

[0719] Human Post Translationally Modified Antibodies

[0720] The production of the anti-Tau HuPTM mAb or HuPTM Fab, should result in a “biobetter” molecule for the treatment of AD, PSP, or FD accomplished via gene therapy—e.g., by administering a viral vector or other DNA expression construct encoding the anti-Tau HuPTM Fab or HuPTM mAb, intrathecally, particularly intracisternal or lumbar administration, or intravenous administration to human subjects (patients) diagnosed with or having one or more symptoms of AD, PSP, or FD, to create a permanent depot in the CNS that continuously supplies the fully-human post-translationally modified, e.g., human-glycosylated, sulfated transgene product produced by transduced CNS cells.

[0721] The cDNA construct for the anti-Tau HuPTMmAb or anti-Tau HuPTM Fab should include a signal peptide that ensures proper co- and post-translational processing (glycosylation and protein sulfation) by the transduced CNS cells. For example, the signal sequence may be MYRMQLLLLIALSLALVTNS (SEQ ID NO: 146).

[0722] As an alternative, or an additional treatment to gene therapy, the anti-Tau HuPTM mAb or HuPTM Fab can be produced in human cell lines by recombinant DNA technology, and administered to patients diagnosed with AD, PSP, or FD, or for whom therapy for AD, PSP, or FD is considered appropriate.

[0723] In specific embodiments, the anti-Tau HuPTM mAb or antigen-binding fragment thereof has heavy and light chains with the amino acid sequences of the heavy and light chain Fab portions of ABBV-8E12 as set forth in FIG. 4A (with glutamine (Q) glycosylation sites; asparaginal (N) glycosylation sites, non-consensus asparaginal (N) glycosylation sites; and tyrosine-O-sulfation sites (Y) are as indicated in the legend) has glycosylation, particularly a 2,6-sialylation, at one or more of the amino acid positions N57, Q107, N157 and/or N199 of the heavy chain (SEQ ID NO: 7) or N78, Q104, N162, and/or N214 of the light chain (SEQ ID NO: 8). Alternatively or in addition to, the HuPTM mAb or antigen binding-fragment thereof with the heavy and light chain variable domain sequences of ABBV-8E12 has a sulfation group at Y96, Y97 and/or Y104 of the heavy chain (SEQ ID NO: 7) and/or Y90 and/or Y91 of the light chain (SEQ ID NO: 8). In other embodiments, the anti-Tau HuPTM mAb or antigen-binding fragment thereof does not contain any detectable (e.g., as detected by assays known in the art, for example, those described in section 5.2, infra) NeuGc moieties and/or does not contain any detectable (e.g., as detected by assays known in the art, for example, those described in section 5.2, infra) alpha-Gal moieties. In certain embodiments, the HuPTM mAb is a full length or substantially full length mAb with an Fc region.

[0724] In specific embodiments, the anti-Tau HuPTM mAb or antigen-binding fragment thereof has heavy and light chains with the amino acid sequences of the heavy and light chain Fab portions of UCB-0107 as set forth in FIG. 4B (with glutamine (Q) glycosylation sites; asparaginal (N) glycosylation sites, non-consensus asparaginal (N) glycosylation sites; and tyrosine-O-sulfation sites (Y) are as indicated in the legend) has glycosylation, particularly a 2,6-sialylation, at one or more of the amino acid positions N32, N58, N76, Q110, N160 and/or N202 of the heavy chain (SEQ ID NO: 9) or N99, N163 and/or N215 of the light chain (SEQ ID NO: 10). Alternatively or in addition to, the HuPTM mAb or antigen binding-fragment thereof with the heavy and light chain variable domain sequences of UCB-0107 has a sulfation group at Y93, Y94, Y101 and/or Y102 of the heavy chain (SEQ ID NO: 9) and/or Y91 and/or Y92 of the light chain (SEQ ID NO: 10). In other embodiments, the anti-Tau HuPTM mAb or antigen-binding fragment thereof does not contain any detectable (e.g., as detected by assays known in the art, for example, those described in section 5.2, infra) NeuGc moieties and/or does not contain any detectable (e.g., as detected by assays known in the art, for example, those described in section 5.2, infra) alpha-Gal moieties. In certain embodiments, the HuPTM mAb is a full length or substantially full length mAb with an Fc region.

[0725] In specific embodiments, the anti-Tau HuPTM mAb or antigen-binding fragment thereof has heavy and light chains with the amino acid sequences of the heavy and light chain Fab portions of NI-105 as set forth in FIG. 4C (with glutamine (Q) glycosylation sites; asparaginal (N) glycosylation sites, non-consensus asparaginal (N) glycosylation sites; and tyrosine-O-sulfation sites (Y) are as indicated in the legend) has glycosylation, particularly a 2,6-sialylation, at one or more of the amino acid positions N77, N107, Q116, and/or N166 of the heavy chain (SEQ ID NO: 11) and/or N172 of the light chain (SEQ ID NO: 12). Alternatively or in addition to, the HuPTM mAb or antigen binding-fragment thereof with the heavy and light chain variable domain sequences of NI-105 has a sulfation group at Y93 and/or Y94 of the heavy chain (SEQ ID NO: 11) and/or Y85 and/or Y86 of the light chain (SEQ ID NO: 12). In other embodiments, the anti-Tau HuPTM mAb or antigen-binding fragment thereof does not contain any detectable (e.g., as detected by assays known in the art, for example, those described in section 5.2, infra) NeuGc moieties and/or does not contain any detectable (e.g., as detected by assays known in the art, for example, those described in section 5.2, infra) alpha-Gal moieties. In certain embodiments, the HuPTM mAb is a full length or substantially full length mAb with an Fc region.

[0726] In certain embodiments, the HuPTM mAb or Fab is therapeutically effective and is at least 0.5%, 1% or 2% 2,6 sialylated and/or sulfated and may be at least 5%, 10% or even 50% or 100% glycosylated 2,6 sialylation and/or sulfated. The goal of gene therapy treatment provided herein is to slow or arrest the progression of AD, PSP, or FD, particularly cognitive impairment, gross or fine motor skill impairment, or vision impairment. Efficacy may be monitored by measuring a reduction in plaque formation and/or an improvement in cognitive function, with motor skills, or with vision or a reduction in the decline in cognitive function, motor skills, or vision.

[0727] Combinations of delivery of the anti-Tau HuPTM mAb or antigen-binding fragment thereof, to the CNS accompanied by delivery of other available treatments are encompassed by the methods provided herein. The additional treatments may be administered before, concurrently or subsequent to the gene therapy treatment. Available treatments for AD, PSP, or FD that could be combined with the gene therapy provided herein include but are not limited to ARICEPT® (donepezil), RAZADYNE® (galantamine), NAMENDA® (rivastigmine), and NAMZARIC® (donepezil and memantine), to name a few, and administration with anti-Tau agents, including but not limited to anti-tau, such as, but not limited to ABBV-8E12, UCB-0107, or NI-105, and anti-An agents, such as, but not limited to solanezumab, lecanemab, or GSK933776.

### 5.3.4. Anti-SEMA4D HuPTM Constructs and Formulations for Huntington's Disease

[0728] Compositions and methods are described for the delivery of HuPTM mAbs and antigen-binding fragments thereof, such as HuPTM Fabs, that bind to semaphorin 4D (SEMA4D) that may have benefit in treating Huntington's disease (HD) and juvenile Huntington's disease (JHD). In particular embodiments, the HuPTM mAb is VX15/2503, or an antigen binding fragment of VX15/2503. The amino acid sequences of Fab fragments of this antibody is provided in FIG. 5. Delivery may be accomplished via gene therapy—e.g., by administering a viral vector or other DNA expression construct encoding an SEMA4D-binding HuPTM mAb (or an antigen binding fragment and/or a hyperglycosylated derivative or other derivative, thereof) to patients (human subjects) diagnosed with, or having one or more symptoms of, HD, to create a permanent depot that continuously supplies the human PTM, e.g., human-glycosylated, transgene product.

[0729] Transgenes

[0730] Provided are recombinant vectors containing a transgene encoding a HuPTM mAb or HuPTM Fab (or other antigen binding fragment of the HuPTM mAb) that binds to SEMA4D that can be administered to deliver the HuPTM mAb or antigen binding fragment in a patient. The transgene is a nucleic acid comprising the nucleotide sequences encoding an antigen binding fragment of an antibody that binds to SEMA4D, such as VX15/2503, or variants there of as detailed herein. The transgene may also encode an anti-SEMA4D antigen binding fragment that contains additional glycosylation sites (e.g., see Courtois et al., 2016, mAbs 8: 99-112 which is incorporated by reference herein in its entirety).

[0731] In certain embodiments, the anti-SEMA4D antigen-binding fragment transgene comprises the nucleotide sequences encoding the heavy and light chains of the Fab portion of VX15/2503 (having amino acid sequences of SEQ ID NOs. 13 and 14, respectively, see Table 5 and FIG. 5). The nucleotide sequences may be codon optimized for expression in human cells. Nucleotide sequences may, for example, comprise the nucleotide sequences of SEQ ID NO: 83 (encoding the VX15/2503 heavy chain Fab portion) and SEQ ID NO: 84 (encoding the VX15/2503 light chain Fab portion) as set forth in Table 6. The heavy and light chain sequences both have a signal or leader sequence at the N-terminus appropriate for expression and secretion in human cells, in particular, human CNS cells. The signal sequence may have the amino acid sequence of MYRMQLLLLIALSLALVTNS (SEQ ID NO: 146) or the one of the sequences found in Table 2 supra.

[0732] In addition to the heavy and light chain variable domain and C_{H}1 and C_{L} sequences, the transgenes may comprise, at the C-terminus of the heavy chain C_{H}1 sequence, all or a portion of the hinge region. In specific embodiments, the anti-SEMA4D-antigen binding domain has a heavy chain variable domain and C_{H}1 domain of SEQ ID NO: 13 with additional hinge region sequence starting after the C-terminal valine (V), contains all or a portion of the amino acid sequence contains all or a portion of the amino acid sequence ESKYGPPCPPCPAPEFLGG (SEQ ID NO: 214), and specifically, ESKYGPPCPPCPA (SEQ ID NO: 216), ESKYGPPCPSCPA (SEQ ID NO: 217), ESKYGPPCPSCPAPEFLGGPSVFL (SEQ ID NO: 218), or ESKYGPPCPPCPAPEFLGGPSVFL (SEQ ID NO: 219) as set forth in FIG. 5. These hinge regions may be encoded by nucleotide sequences at the 3′ end of SEQ ID NO: 83 by the hinge region encoding sequences set forth in Table 6 (SEQ ID NO: 83). In another embodiment, the transgenes comprise the amino acid sequences encoding the full length (or substantially full length) heavy and light chains of the antibody, comprising the Fc domain at the C terminus of the heavy chain, e.g., an IgG4 Fc domain, such as SEQ ID No. 285 or as depicted in FIG. 23, or a mutant or variant thereof. The Fc domain may be engineered for altered binding to one or more Fc receptors and/or effector function as disclosed in Section 5.1.9, infra.

[0733] In certain embodiments, the anti-SEMA4D antigen-binding fragment transgene encodes an SEMA4D antigen-binding fragment comprising a light chain comprising an amino acid sequence that is at least 85%, 86%, 87%, 88%, 89%, 90%, 91%, 92%, 93%, 94%, 95%, 96%, 97%, 98% or 99% identical to the sequence set forth in SEQ ID NO: 14. In certain embodiments, the anti-SEMA4D antigen-binding fragment transgene encodes an SEMA4D antigen-binding fragment comprising a heavy chain comprising an amino acid sequence that is at least 85%, 86%, 87%, 88%, 89%, 90%, 91%, 92%, 93%, 94%, 95%, 96%, 97%, 98% or 99% identical to the sequence set forth in SEQ ID NO: 13. In certain embodiments, the anti-SEMA4D antigen-binding fragment transgene encodes an antigen-binding fragment comprising a light chain comprising an amino acid sequence that is at least 85%, 86%, 87%, 88%, 89%, 90%, 91%, 92%, 93%, 94%, 95%, 96%, 97%, 98% or 99% identical to the sequence set forth in SEQ ID NO: 14 and a heavy chain comprising an amino acid sequence that is at least 85%, 86%, 87%, 88%, 89%, 90%, 91%, 92%, 93%, 94%, 95%, 96%, 97%, 98% or 99% identical to the sequence set forth in SEQ ID NO: 13. In specific embodiments, the SEMA4D antigen binding fragment comprises a heavy chain comprising an amino acid sequence of SEQ ID NO: 13 with 1, 2, 3, 4, 5, 6, 7, 8, 9, 10, 11, 12, 13, 14, 15 or more amino acid substitutions, insertions or deletions, and the substitutions, insertions or deletions are made, e.g., in the framework regions (e.g., those regions outside of the CDRs, which CDRs are underlined in FIG. 5) or are substitutions with an amino acid present at that position in the heavy chain of one or more of the other therapeutic antibodies, for example, as identified by the alignment in FIG. 20A. In specific embodiments, the SEMA4D antigen binding fragment comprises a light chain comprising an amino acid sequence of SEQ ID NO: 14 with 1, 2, 3, 4, 5, 6, 7, 8, 9, 10, 11, 12, 13, 14, 15 or more amino acid substitutions, insertions or deletions, and the substitutions, insertions or deletions are made, e.g., in the framework regions (e.g., those regions outside of the CDRs, which CDRs are underlined in FIG. 5) or are substitutions with an amino acid present at that position in the light chain of one or more of the other therapeutic antibodies, for example, as identified by the alignment in FIG. 20B.

[0734] In certain embodiments, the anti-SEMA4D antigen-binding fragment transgene encodes a hyperglycosylated VX15/2503 Fab, comprising a heavy chain and a light chain of SEQ ID NOs: 13 and 14, respectively, with one or more of the following mutations: T113N (heavy chain), Q156N or Q156S (light chain), and/or E191N (light chain) (see FIG. 20A (heavy chain) and B (light chain)).

[0735] In certain embodiments, the anti-SEMA4D antigen-binding fragment transgene encodes an antigen-binding fragment and comprises the nucleotide sequences encoding the six VX15/2503 CDRs which are underlined in the heavy and light chain variable domain sequences of FIG. 5 which are spaced between framework regions, generally human framework regions, and associated with constant domains depending upon the form of the antigen-binding molecule, as is known in the art to form the heavy and/or light chain variable domain of an anti-SEMA4D antibody or antigen-binding fragment thereof.

[0736] Gene Therapy Methods

[0737] Provided are methods of treating human subjects for HD or juvenile HD by administration of a viral vector containing a transgene encoding an anti-SEMA4D antibody, or antigen binding fragment thereof. The antibody may be VX15/2503 and is, e.g., a Fab fragment thereof, or other antigen-binding fragment thereof. In certain embodiments, the transgene encodes the full length or substantially full length VX15/2503. In certain embodiments, the patient has been diagnosed with and/or has symptoms associated with HD, e.g., mild involuntary movements, tremors, and/or dystonia associated with early HD or even pre-HD. Recombinant vectors used for delivering the transgene are described in Section 5.4.1. Such vectors should have a tropism for human CNS cells and can include non-replicating rAAV, particularly those bearing an AAV9, AAVrh10, AAVrh20, AAVrh39, or AAVcy5 capsid. The recombinant vectors can be administered in any manner such that the recombinant vector enters the CNS, e.g., by introducing the recombinant vector into the cerebral spinal fluid (CSF). See Section 5.5.1 for details regarding the methods of treatment.

[0738] Subjects to whom such gene therapy is administered can be those responsive to anti-SEMA4D therapy. In particular embodiments, the methods encompass treating patients who have been diagnosed with HD, or have one or more symptoms associated therewith, and identified as responsive to treatment with an anti-SEMA4D antibody or considered a good candidate for therapy with an anti-SEMA4D antibody. In specific embodiments, the patients have previously been treated with VX15/2503, and have been found to be responsive to VX15/2503. To determine responsiveness, the anti-SEMA4D antibody or antigen-binding fragment transgene product (e.g., produced in human cell culture, bioreactors, etc.) may be administered directly to the subject.

[0739] Human Post Translationally Modified Antibodies

[0740] The production of the anti-SEMA4D HuPTM mAb or HuPTM Fab, should result in a “biobetter” molecule for the treatment of HD accomplished via gene therapy—e.g., by administering a viral vector or other DNA expression construct encoding the anti-SEMA4D HuPTM Fab, intrathecally, particularly intracisternal or lumbar administration, or intravenous administration to human subjects (patients) diagnosed with or having one or more symptoms of HD, to create a permanent depot in the CNS that continuously supplies the fully-human post-translationally modified, e.g., human-glycosylated, sulfated transgene product produced by transduced CNS cells.

[0741] The cDNA construct for the anti-SEMA4D HuPTM mAb or anti-SEMA4D HuPTM Fab should include a signal peptide that ensures proper co- and post-translational processing (glycosylation and protein sulfation) by the transduced CNS cells. For example, the signal sequence may be MYRMQLLLLIALSLALVTNS (SEQ ID NO: 146).

[0742] As an alternative, or an additional treatment to gene therapy, the anti-SEMA4D HuPTM mAb or HuPTM Fab can be produced in human cell lines by recombinant DNA technology and administered to patients diagnosed with HD or juvenile HD, or for whom therapy for HD or juvenile HD is considered appropriate.

[0743] In specific embodiments, the anti-SEMA4D HuPTM mAb or antigen-binding fragment thereof has heavy and light chains with the amino acid sequences of the heavy and light chain Fab portions of VX15/2503 as set forth in FIG. 5 (with glutamine (Q) glycosylation sites; asparaginal (N) glycosylation sites, non-consensus asparaginal (N) glycosylation sites; and tyrosine-O-sulfation sites (Y) are as indicated in the legend) has glycosylation, particularly a 2,6-sialylation, at one or more of the amino acid positions N61, Q110, N160 and/or N207 of the heavy chain (SEQ ID NO:13) or N22, Q104, N154 and/or N206 of the light chain (SEQ ID NO: 14). Alternatively or in addition to, the HuPTM mAb or antigen binding-fragment thereof with the heavy and light chain variable domain sequences of VX15/2503 has a sulfation group at Y94, Y95, Y99, Y100, and/or Y101 of the heavy chain (SEQ ID NO: 13) or Y31, Y36, Y90, and/or Y91 of the light chain (SEQ ID NO: 14). In other embodiments, the anti-SEMA4D HuPTM mAb or antigen-binding fragment thereof does not contain any detectable (e.g., as detected by assays known in the art, for example, those described in section 5.2, infra) NeuGc moieties and/or does not contain any detectable (e.g., as detected by assays known in the art, for example, those described in section 5.2, infra) alpha-Gal moieties. In certain embodiments, the HuPTM mAb is a full length or substantially full length mAb with an Fc region.

[0744] In certain embodiments, the HuPTM mAb or Fab is therapeutically effective and is at least 0.5%, 1% or 2% 2,6 sialylated and/or sulfated and may be at least 5%, 10% or even 50% or 100% glycosylated 2,6 sialylation and/or sulfated. The goal of gene therapy treatment provided herein is to slow or arrest the progression of HD or juvenile HD, particular the impairment in voluntary movements. Efficacy may be monitored by measuring improvements in movement, dystonia, and/or an improvement in cognitive function or a reduction in the decline in chorea control and cognitive function. In the case of juvenile HD, efficacy may be monitored by measuring improvements in muscle stiffness, dystonia, and/or chorea or a reduction in the decline in muscle and cognitive function.

[0745] Combinations of delivery of the anti-SEMA4D HuPTM mAb or antigen-binding fragment thereof, to the CNS accompanied by delivery of other available treatments are encompassed by the methods provided herein. The additional treatments may be administered before, concurrently or subsequent to the gene therapy treatment. Available treatments for HD or juvenile HD that could be combined with the gene therapy provided herein include but are not limited to speech, physical, and occupational therapy, XENAZINE® (Tetrabenazine), KLONOPIN® (clonazepam), HALDOL® (haloperidol), CLORAZIL® (clozapine), PROZAD® (fluoxetine), ZOLOFT® (sertraline), and PAMELOR® (nortriptyline), and administration with anti-SEMA4D agents, including but not limited to VX15/2503.

### 5.3.5. Anti-Alpha-Synuclein HuPTM Constructs and Formulations for Parkinson and Synucleinopathies

[0746] Compositions and methods are described for the delivery of HuPTM mAbs and antigen-binding fragments thereof, such as HuPTM Fabs, that bind to alpha-synuclein (SNCA) that may have benefit in treating Parkinson disease (PD) and other synucleinopathies such as dementia with Lewy bodies (DLB), pure autonomic failure (PAF), and multiple system atrophy (MSA). In particular embodiments, the HuPTM mAb is prasinezumab, NI-202 (BIIB054), and MED-1341, or an antigen binding fragment of one of the foregoing. The amino acid sequences of Fab fragments of these antibodies are provided in FIGS. 6A-C. Delivery may be accomplished via gene therapy—e.g., by administering a viral vector or other DNA expression construct encoding a SNCA-binding HuPTM mAb (or an antigen binding fragment and/or a hyperglycosylated derivative or other derivative, thereof) to patients (human subjects) diagnosed with, or having one or more symptoms of, PD, DLB, PAF, MSA, to create a permanent depot that continuously supplies the human PTM, e.g., human-glycosylated, transgene product.

[0747] Transgenes

[0748] Provided are recombinant vectors containing a transgene encoding a HuPTM mAb or HuPTM Fab (or other antigen binding fragment of the HuPTM mAb) that binds to SNCA that can be administered to deliver the HuPTM mAb or antigen binding fragment in a patient. The transgene is a nucleic acid comprising the nucleotide sequences encoding an antigen binding fragment of an antibody that binds to SNCA, such as prasinezumab, NI-202 (BIIB054), or MED-1341, or variants there of as detailed herein. The transgene may also encode anti-SNCA antigen binding fragment that contains additional glycosylation sites (e.g., see Courtois et al., 2016, mAbs 8: 99-112 which is incorporated by reference herein in its entirety).

[0749] In certain embodiments, the anti-SNCA antigen-binding fragment transgene comprises the nucleotide sequences encoding the heavy and light chains of the Fab portion of prasinezumab (having amino acid sequences of SEQ ID NOs. 15 and 16, respectively, see Table 5 and FIG. 6A). The nucleotide sequences may be codon optimized for expression in human cells. Nucleotide sequences may, for example, comprise the nucleotide sequences of SEQ ID NO: 85 (encoding the prasinezumab heavy chain Fab portion) and SEQ ID NO: 86 (encoding the prasinezumab light chain Fab portion) as set forth in Table 6. The heavy and light chain sequences both have a signal or leader sequence at the N-terminus appropriate for expression and secretion in human cells, in particular, human CNS cells. The signal sequence may have the amino acid sequence of MYRMQLLLLIALSLALVTNS (SEQ ID NO: 146) or the one of the sequences found in Table 2 supra.

[0750] In addition to the heavy and light chain variable domain and C_{H}1 and C_{L} domain sequences, the transgenes may comprise, at the C-terminus of the heavy chain C_{H}1 sequence, all or a portion of the hinge region. In specific embodiments, the anti-SNCA-antigen binding domain has a heavy chain Fab fragment of SEQ ID NO: 15 with additional hinge region sequence starting after the C-terminal valine (V), contains all or a portion of the amino acid sequence EPKSCDKTHTCPPCPAPELLGG (SEQ ID NO: 194), and specifically, EPKSCDKTHL (SEQ ID NO: 196), EPKSCDKTHT (SEQ ID NO: 197), EPKSCDKTHTCPPCPA (SEQ ID NO: 198), EPKSCDKTHLCPPCPA (SEQ ID NO: 199), EPKSCDKTHTCPPCPAPELLGGPSVFL (SEQ ID NO: 200) or EPKSCDKTHLCPPCPAPELLGGPSVFL (SEQ ID NO: 201) as set forth in FIG. 6A. These hinge regions may be encoded by nucleotide sequences at the 3′ end of SEQ ID NO: 85 by the hinge region encoding sequences set forth in Table 5 (SEQ ID NO: 85). In another embodiment, the transgenes comprise the amino acid sequences encoding the full length (or substantially full length) heavy and light chains of the antibody, comprising the Fc domain at the C terminus of the heavy chain, e.g., having an amino acid sequence of SEQ ID NO: 293 (Table 7), or an IgG1 Fc domain, such as SEQ ID No. 283 or as depicted in FIG. 23, or a mutant or variant thereof. The Fc domain may be engineered for altered binding to one or more Fc receptors and/or effector function as disclosed in Section 5.1.9, infra.

[0751] In certain embodiments, the anti-SNCA antigen-binding fragment transgene encodes a SNCA antigen-binding fragment comprising a light chain comprising an amino acid sequence that is at least 85%, 86%, 87%, 88%, 89%, 90%, 91%, 92%, 93%, 94%, 95%, 96%, 97%, 98% or 99% identical to the sequence set forth in SEQ ID NO: 16. In certain embodiments, the anti-SNCA antigen-binding fragment transgene encodes a SNCA antigen-binding fragment comprising a heavy chain comprising an amino acid sequence that is at least 85%, 86%, 87%, 88%, 89%, 90%, 91%, 92%, 93%, 94%, 95%, 96%, 97%, 98% or 99% identical to the sequence set forth in SEQ ID NO: 15. In certain embodiments, the anti-SNCA antigen-binding fragment transgene encodes an antigen-binding fragment comprising a light chain comprising an amino acid sequence that is at least 85%, 86%, 87%, 88%, 89%, 90%, 91%, 92%, 93%, 94%, 95%, 96%, 97%, 98% or 99% identical to the sequence set forth in SEQ ID NO: 16 and a heavy chain comprising an amino acid sequence that is at least 85%, 86%, 87%, 88%, 89%, 90%, 91%, 92%, 93%, 94%, 95%, 96%, 97%, 98% or 99% identical to the sequence set forth in SEQ ID NO: 15. In specific embodiments, the SNCA antigen-binding fragment comprises a heavy chain comprising an amino acid sequence of SEQ ID NO: 16 with 1, 2, 3, 4, 5, 6, 7, 8, 9, 10, 11, 12, 13, 14, 15 or more amino acid substitutions, insertions or deletions, and the substitutions, insertions or deletions are made, e.g., in the framework regions (e.g., those regions outside of the CDRs, which CDRs are underlined in FIG. 6A) or are substitutions with an amino acid present at that position in the heavy chain of one or more of the other therapeutic antibodies, for example, as identified by the alignment in FIG. 20A. In specific embodiments, the SNCA antigen binding fragment comprises a light chain comprising an amino acid sequence of SEQ ID NO: 16 with 1, 2, 3, 4, 5, 6, 7, 8, 9, 10, 11, 12, 13, 14, 15 or more amino acid substitutions, insertions or deletions, and the substitutions, insertions or deletions are made, e.g., in the framework regions (e.g., those regions outside of the CDRs, which CDRs are underlined in FIG. 6A) or are substitutions with an amino acid present at that position in the light chain of one or more of the other therapeutic antibodies, for example, as identified by the alignment in FIG. 20B.

[0752] In certain embodiments, the anti-Tau antigen-binding fragment transgene encodes a hyperglycosylated prasinezumab Fab, comprising a heavy chain and a light chain of SEQ ID NOs: 15 and 16, respectively, with one or more of the following mutations: L119N (heavy chain), Q166N or Q166S (light chain), and/or E201N (light chain) (see FIG. 20A (heavy chain) and B (light chain)).

[0753] In certain embodiments, the anti-SNCA antigen-binding fragment transgene encodes an antigen-binding fragment and comprises the nucleotide sequences encoding the six prasinezumab CDRs which are underlined in the heavy and light chain variable domain sequences of FIG. 6A which are spaced between framework regions, generally human framework regions, and associated with constant domains depending upon the form of the antigen-binding molecule, as is known in the art to form the heavy and/or light chain variable domain of an anti-SNCA antibody or antigen-binding fragment thereof.

[0754] In certain embodiments, the anti-SNCA antigen-binding fragment transgene comprises the nucleotide sequences encoding the heavy and light chains of the Fab portion of NI-202 (having amino acid sequences of SEQ ID NOs. 17 and 18, respectively, see Table 5 and FIG. 6B). The nucleotide sequences may be codon optimized for expression in human cells. Nucleotide sequences may, for example, comprise the nucleotide sequences of SEQ ID NO: 87 (encoding the NI-202 heavy chain Fab portion) and SEQ ID NO: 88 (encoding the NI-202 light chain Fab portion) as set forth in Table 6. The heavy and light chain sequences both have a signal or leader sequence at the N-terminus appropriate for expression and secretion in human cells, in particular, human CNS cells. The signal sequence may have the amino acid sequence of MYRMQLLLLIALSLALVTNS (SEQ ID NO: 146) or the one of the sequences found in Table 2 supra.

[0755] In addition to the heavy and light chain variable domain and C_{H}1 and C_{L} domain sequences, the transgenes may comprise, at the C-terminus of the heavy chain C_{H}1 domain sequence, all or a portion of the hinge region. In specific embodiments, the anti-SNCA-antigen binding domain has a heavy chain Fab fragment of SEQ ID NO: 17 with additional hinge region sequence starting after the C-terminal valine (V), contains all or a portion of the amino acid sequence EPKSCDKTHTCPPCPAPELLGG (SEQ ID NO: 194), and specifically, EPKSCDKTHL (SEQ ID NO: 196), EPKSCDKTHT (SEQ ID NO: 197), EPKSCDKTHTCPPCPA (SEQ ID NO: 198), EPKSCDKTHLCPPCPA (SEQ ID NO: 199), EPKSCDKTHTCPPCPAPELLGGPSVFL (SEQ ID NO: 200) or EPKSCDKTHLCPPCPAPELLGGPSVFL (SEQ ID NO: 201) as set forth in FIG. 6B. These hinge regions may be encoded by nucleotide sequences at the 3′ end of SEQ ID NO: 87 by the hinge region encoding sequences set forth in Table 5 (SEQ ID NO: 87). In another embodiment, the transgenes comprise the amino acid sequences encoding the full length (or substantially full length) heavy and light chains of the antibody, comprising the Fc domain at the C terminus of the heavy chain, e.g., an IgG1 Fc domain, such as SEQ ID No. 283 or as depicted in FIG. 23, or a mutant or variant thereof. The Fc domain may be engineered for altered binding to one or more Fc receptors and/or effector function as disclosed in Section 5.1.9, infra.

[0756] In certain embodiments, the anti-SNCA antigen-binding fragment transgene encodes a SNCA antigen-binding fragment comprising a light chain comprising an amino acid sequence that is at least 85%, 86%, 87%, 88%, 89%, 90%, 91%, 92%, 93%, 94%, 95%, 96%, 97%, 98% or 99% identical to the sequence set forth in SEQ ID NO: 18. In certain embodiments, the anti-SNCA antigen-binding fragment transgene encodes a SNCA antigen-binding fragment comprising a heavy chain comprising an amino acid sequence that is at least 85%, 86%, 87%, 88%, 89%, 90%, 91%, 92%, 93%, 94%, 95%, 96%, 97%, 98% or 99% identical to the sequence set forth in SEQ ID NO: 17. In certain embodiments, the anti-SNCA antigen-binding fragment transgene encodes an antigen-binding fragment comprising a light chain comprising an amino acid sequence that is at least 85%, 86%, 87%, 88%, 89%, 90%, 91%, 92%, 93%, 94%, 95%, 96%, 97%, 98% or 99% identical to the sequence set forth in SEQ ID NO: 18 and a heavy chain comprising an amino acid sequence that is at least 85%, 86%, 87%, 88%, 89%, 90%, 91%, 92%, 93%, 94%, 95%, 96%, 97%, 98% or 99% identical to the sequence set forth in SEQ ID NO: 17. In specific embodiments, the SNCA antigen-binding fragment comprises a heavy chain comprising an amino acid sequence of SEQ ID NO: 17 with 1, 2, 3, 4, 5, 6, 7, 8, 9, 10, 11, 12, 13, 14, 15 or more amino acid substitutions, insertions or deletions, and the substitutions, insertions or deletions are made, e.g., in the framework regions (e.g., those regions outside of the CDRs, which CDRs are underlined in FIG. 6B) or are substitutions with an amino acid present at that position in the heavy chain of one or more of the other therapeutic antibodies, for example, as identified by the alignment in FIG. 20A. In specific embodiments, the SNCA antigen binding fragment comprises a light chain comprising an amino acid sequence of SEQ ID NO: 18 with 1, 2, 3, 4, 5, 6, 7, 8, 9, 10, 11, 12, 13, 14, 15 or more amino acid substitutions, insertions or deletions, and the substitutions, insertions or deletions are made, e.g., in the framework regions (e.g., those regions outside of the CDRs, which CDRs are underlined in FIG. 6B) or are substitutions with an amino acid present at that position in the light chain of one or more of the other therapeutic antibodies, for example, as identified by the alignment in FIG. 20B.

[0757] In certain embodiments, the anti-SNCA antigen-binding fragment transgene encodes a hyperglycosylated NI-202 Fab, comprising a heavy chain and a light chain of SEQ ID NOs: 17 and 18, respectively, with one or more of the following mutations: L119N (heavy chain), Q166N or Q166S (light chain), and/or E199N (light chain) (see FIG. 20A (heavy chain) and B (light chain)).

[0758] In certain embodiments, the anti-SNCA antigen-binding fragment transgene encodes an antigen-binding fragment and comprises the nucleotide sequences encoding the six NI-202 CDRs which are underlined in the heavy and light chain variable domain sequences of FIG. 6B which are spaced between framework regions, generally human framework regions, and associated with constant domains depending upon the form of the antigen-binding molecule, as is known in the art to form the heavy and/or light chain variable domain of an anti-SNCA antibody or antigen-binding fragment thereof.

[0759] In certain embodiments, the anti-SNCA antigen-binding fragment transgene comprises the nucleotide sequences encoding the heavy and light chains of the Fab portion of MED-1341 (having amino acid sequences of SEQ ID NOs. 19 and 20, respectively, see Table 5 and FIG. 6C). The nucleotide sequences may be codon optimized for expression in human cells. Nucleotide sequences may, for example, comprise the nucleotide sequences of SEQ ID NO: 89 (encoding the MEDI-1341 heavy chain Fab portion) and SEQ ID NO: 90 (encoding the MEDI-1341 light chain Fab portion) as set forth in Table 6. The heavy and light chain sequences both have a signal or leader sequence at the N-terminus appropriate for expression and secretion in human cells, in particular, human CNS cells. The signal sequence may have the amino acid sequence of MYRMQLLLLIALSLALVTNS (SEQ ID NO: 146) or the one of the sequences found in Table 2 supra.

[0760] In addition to the heavy and light chain variable domain and C_{H}1 or C_{L} sequences, the transgenes may comprise, at the C-terminus of the heavy chain C_{H}1 sequence, all or a portion of the hinge region. In specific embodiments, the anti-SNCA-antigen binding domain has a heavy chain Fab fragment of SEQ ID NO: 19 with additional hinge region sequence starting after the C-terminal valine (V), contains all or a portion of the amino acid sequence EPKSCDKTHTCPPCPAPEFEGG (SEQ ID NO: 206), and specifically, EPKSCDKTHL (SEQ ID NO: 196), EPKSCDKTHT (SEQ ID NO: 197), EPKSCDKTHTCPPCPA (SEQ ID NO: 198), EPKSCDKTHLCPPCPA (SEQ ID NO: 199), EPKSCDKTHTCPPCPAPEFEGGPSVFL (SEQ ID NO: 208) or EPKSCDKTHLCPPCPAPEFEGGPSVFL (SEQ ID NO: 209) as set forth in FIG. 6C. These hinge regions may be encoded by nucleotide sequences at the 3′ end of SEQ ID NO: 89 by the hinge region encoding sequences set forth in Table 6 (SEQ ID NO: 89). In another embodiment, the transgenes comprise the amino acid sequences encoding the full length (or substantially full length) heavy and light chains of the antibody, comprising the Fc domain at the C terminus of the heavy chain, e.g., having an amino acid sequence of SEQ ID NO: 294 (Table 7) or an IgG1 Fc domain, such as SEQ ID No. 283 or as depicted in FIG. 23, or a mutant or variant thereof. The Fc domain may be engineered for altered binding to one or more Fc receptors and/or effector function as disclosed in Section 5.1.9, infra.

[0761] In certain embodiments, the anti-SNCA antigen-binding fragment transgene encodes a SNCA antigen-binding fragment comprising a light chain comprising an amino acid sequence that is at least 85%, 86%, 87%, 88%, 89%, 90%, 91%, 92%, 93%, 94%, 95%, 96%, 97%, 98% or 99% identical to the sequence set forth in SEQ ID NO: 20. In certain embodiments, the anti-SNCA antigen-binding fragment transgene encodes a SNCA antigen-binding fragment comprising a heavy chain comprising an amino acid sequence that is at least 85%, 86%, 87%, 88%, 89%, 90%, 91%, 92%, 93%, 94%, 95%, 96%, 97%, 98% or 99% identical to the sequence set forth in SEQ ID NO: 19. In certain embodiments, the anti-SNCA antigen-binding fragment transgene encodes an antigen-binding fragment comprising a light chain comprising an amino acid sequence that is at least 85%, 86%, 87%, 88%, 89%, 90%, 91%, 92%, 93%, 94%, 95%, 96%, 97%, 98% or 99% identical to the sequence set forth in SEQ ID NO: 20 and a heavy chain comprising an amino acid sequence that is at least 85%, 86%, 87%, 88%, 89%, 90%, 91%, 92%, 93%, 94%, 95%, 96%, 97%, 98% or 99% identical to the sequence set forth in SEQ ID NO: 19. In specific embodiments, the SNCA antigen-binding fragment comprises a heavy chain comprising an amino acid sequence of SEQ ID NO: 19 with 1, 2, 3, 4, 5, 6, 7, 8, 9, 10, 11, 12, 13, 14, 15 or more amino acid substitutions, insertions or deletions, and the substitutions, insertions or deletions are made, e.g., in the framework regions (e.g., those regions outside of the CDRs, which CDRs are underlined in FIG. 6C) or are substitutions with an amino acid present at that position in the heavy chain of one or more of the other therapeutic antibodies, for example, as identified by the alignment in FIG. 20A. In specific embodiments, the SNCA antigen binding fragment comprises a light chain comprising an amino acid sequence of SEQ ID NO: 20 with 1, 2, 3, 4, 5, 6, 7, 8, 9, 10, 11, 12, 13, 14, 15 or more amino acid substitutions, insertions or deletions, and the substitutions, insertions or deletions are made, e.g., in the framework regions (e.g., those regions outside of the CDRs, which CDRs are underlined in FIG. 6C) or are substitutions with an amino acid present at that position in the light chain of one or more of the other therapeutic antibodies, for example, as identified by the alignment in FIG. 20B.

[0762] In certain embodiments, the anti-SNCA antigen-binding fragment transgene encodes a hyperglycosylated MEDI-1341 Fab, comprising a heavy chain and a light chain of SEQ ID NOs: 19 and 20, respectively, with one or more of the following mutations: T117N (heavy chain) and/or Q203N (light chain) (see FIG. 20A (heavy chain) and B (light chain)).

[0763] In certain embodiments, the anti-SNCA antigen-binding fragment transgene encodes an antigen-binding fragment and comprises the nucleotide sequences encoding the six MEDI-1341 CDRs which are underlined in the heavy and light chain variable domain sequences of FIG. 6C which are spaced between framework regions, generally human framework regions, and associated with constant domains depending upon the form of the antigen-binding molecule, as is known in the art to form the heavy and/or light chain variable domain of an anti-SNCA antibody or antigen-binding fragment thereof.

[0764] Gene Therapy Methods

[0765] Provided are methods of treating human subjects for PD, DLB, PAF, MSA, or other synulceinopathies by administration of a viral vector containing a transgene encoding an anti-SNCA antibody, or antigen binding fragment thereof. The antibody may be prasinezumab, NI-202 (BIIB054), or MED-1341, and is e.g. a Fab fragment thereof, or other antigen-binding fragment thereof. In other embodiments, the transgene encodes a full length or substantially full-length antibody with Fc region. In certain embodiments, the patient has been diagnosed with and/or has symptoms associated with PD or other synulceinopathies, e.g., a mild cognitive and/or motor skill impairment associated with early PD or even pre-PD. Recombinant vectors used for delivering the transgene are described in Section 5.4.1. Such vectors should have a tropism for human CNS cells and can include non-replicating rAAV, particularly those bearing an AAV9, AAVrh10, AAVrh20, AAVrh39, or AAVcy5 capsid. The recombinant vectors can be administered in any manner such that the recombinant vector enters the CNS, e.g., by introducing the recombinant vector into the cerebral spinal fluid (CSF). See Section 5.5.1 for details regarding the methods of treatment.

[0766] Subjects to whom such gene therapy is administered can be those responsive to anti-SNCA therapy. In certain embodiments, the methods encompass treating patients who have been diagnosed with PD, DLB, PAF, or MSA, or have one or more symptoms associated therewith, and identified as responsive to treatment with an anti-SNCA antibody or considered a good candidate for therapy with an anti-SNCA antibody. In specific embodiments, the patients have previously been treated with prasinezumab, NI-202 (B1113054) and/or MED-1341, and have been found to be responsive to prasinezumab, NI-202 (BIIB054) and/or MED-1341. To determine responsiveness, the anti-SNCA antibody or antigen-binding fragment transgene product (e.g., produced in human cell culture, bioreactors, etc.) may be administered directly to the subject.

[0767] Human Post Translationally Modified Antibodies

[0768] The production of the anti-SNCA HuPTM mAb or HuPTM Fab, should result in a “biobetter” molecule for the treatment of PD, DLB, PAF, or MSA accomplished via gene therapy—e.g., by administering a viral vector or other DNA expression construct encoding the anti-SNCA HuPTM Fab or HuPTM mAb, intrathecally, particularly intracisternal or lumbar administration, or intravenous administration to human subjects (patients) diagnosed with or having one or more symptoms of PD, DLB, PAF, or MSA, to create a permanent depot in the CNS that continuously supplies the fully-human post-translationally modified, e.g., human-glycosylated, sulfated transgene product produced by transduced CNS cells.

[0769] The cDNA construct for the anti-SNCA HuPTMmAb or anti-SNCA HuPTM Fab should include a signal peptide that ensures proper co- and post-translational processing (glycosylation and protein sulfation) by the transduced CNS cells. For example, the signal sequence may be MYRMQLLLLIALSLALVTNS (SEQ ID NO: 146).

[0770] As an alternative, or an additional treatment to gene therapy, the anti-SNCA HuPTM mAb or HuPTM Fab can be produced in human cell lines by recombinant DNA technology, and administered to patients diagnosed with PD, DLB, PAF, or MSA or for whom therapy for PD, DLB, PAF or MSA is considered appropriate.

[0771] In specific embodiments, the anti-SNCA HuPTM mAb or antigen-binding fragment thereof has heavy and light chains with the amino acid sequences of the heavy and light chain Fab portions of prasinezumab as set forth in FIG. 6A (with glutamine (Q) glycosylation sites; asparaginal (N) glycosylation sites, non-consensus asparaginal (N) glycosylation sites; and tyrosine-O-sulfation sites (Y) are as indicated in the legend) has glycosylation, particularly a 2,6-sialylation, at one or more of the amino acid positions Q108 and/or N158 of the heavy chain (SEQ ID NO: 15) or N34, N164, and/or N216 of the light chain (SEQ ID NO: 16). Alternatively or in addition to, the HuPTM mAb or antigen binding-fragment thereof with the heavy and light chain variable domain sequences of prasinezumab has a sulfation group at Y94 and/or Y95 of the heavy chain (SEQ ID NO: 15) and/or Y92 and/or Y93 of the light chain (SEQ ID NO: 16). In other embodiments, the anti-SNCA HuPTM mAb or antigen-binding fragment thereof does not contain any detectable (e.g., as detected by assays known in the art, for example, those described in section 5.2, infra) NeuGc moieties and/or does not contain any detectable (e.g., as detected by assays known in the art, for example, those described in section 5.2, infra) alpha-Gal moieties. In certain embodiments, the HuPTM mAb is a full length or substantially full length mAb with an Fc region.

[0772] In specific embodiments, the anti-SNCA HuPTM mAb or antigen-binding fragment thereof has heavy and light chains with the amino acid sequences of the heavy and light chain Fab portions of NI-202 as set forth in FIG. 6B (with glutamine (Q) glycosylation sites; asparaginal (N) glycosylation sites, non-consensus asparaginal (N) glycosylation sites; and tyrosine-O-sulfation sites (Y) are as indicated in the legend) has glycosylation, particularly a 2,6-sialylation, at one or more of the amino acid positions N71, Q116, and/or N166 of the heavy chain (SEQ ID NO: 17) or N34, N164 and/or N216 of the light chain (SEQ ID NO: 18). Alternatively or in addition to, the HuPTM mAb or antigen binding-fragment thereof with the heavy and light chain variable domain sequences of NI-202 has a sulfation group at Y94 and/or Y95 of the heavy chain (SEQ ID NO: 17) or Y92 and/or Y93 of the light chain (SEQ ID NO: 18). In other embodiments, the anti-SNCA HuPTM mAb or antigen-binding fragment thereof does not contain any detectable (e.g., as detected by assays known in the art, for example, those described in section 5.2, infra) NeuGc moieties and/or does not contain any detectable (e.g., as detected by assays known in the art, for example, those described in section 5.2, infra) alpha-Gal moieties. In certain embodiments, the HuPTM mAb is a full length or substantially full length mAb with an Fc region.

[0773] In specific embodiments, the anti-SNCA HuPTM mAb or antigen-binding fragment thereof has heavy and light chains with the amino acid sequences of the heavy and light chain Fab portions of MEDI-1341 as set forth in FIG. 6C (with glutamine (Q) glycosylation sites; asparaginal (N) glycosylation sites, non-consensus asparaginal (N) glycosylation sites; and tyrosine-O-sulfation sites (Y) are as indicated in the legend) has glycosylation, particularly a 2,6-sialylation, at one or more of the amino acid positions N77, Q114, and/or N164 of the heavy chain (SEQ ID NO: 19) or N172 of the light chain (SEQ ID NO: 20). Alternatively or in addition to, the HuPTM mAb or antigen binding-fragment thereof with the heavy and light chain variable domain sequences of MED-1341 has a sulfation group at Y94 and/or Y95 of the heavy chain (SEQ ID NO: 19) or Y94 and/or Y95 of the light chain (SEQ ID NO: 20). In other embodiments, the anti-SNCA HuPTM mAb or antigen-binding fragment thereof does not contain any detectable (e.g., as detected by assays known in the art, for example, those described in section 5.2, infra) NeuGc moieties and/or does not contain any detectable (e.g., as detected by assays known in the art, for example, those described in section 5.2, infra) alpha-Gal moieties. In certain embodiments, the HuPTM mAb is a full length or substantially full length mAb with an Fc region.

[0774] In certain embodiments, the HuPTM mAb or Fab is therapeutically effective and is at least 0.5%, 1% or 2% 2,6 sialylated and/or sulfated and may be at least 5%, 10% or even 50% or 100% glycosylated 2,6 sialylation and/or sulfated. The goal of gene therapy treatment provided herein is to slow or arrest the progression of PD, DLB, PFA, or MSP, particularly cognitive impairment, gross or fine motor skill impairment, or vision impairment. Efficacy may be monitored by measuring an improvement in cognitive function, motor skills (i.e. posture, balance, tremor), and/or vision or a reduction in the decline in cognitive function, motor skills, or vision.

[0775] Combinations of delivery of the anti-SNCA HuPTM mAb or antigen-binding fragment thereof, to the CNS accompanied by delivery of other available treatments are encompassed by the methods provided herein. The additional treatments may be administered before, concurrently or subsequent to the gene therapy treatment. Available treatments for PD, DLB, PFA, or MSP that could be combined with the gene therapy provided herein include but are not limited to RYTARY®, SINEMET®, or DUOPA® (carbidopa/levodopa), to name a few, and administration with anti-SNCA agents, including but not limited to anti-SNCA, such as, but not limited to prasinezumab, NI-202 (BIIB054), or MED-1341.

### 5.3.6. Anti-SOD1 HuPTM Constructs and Formulations for Alzheimer's Disease and Amyotrophic Lateral Sclerosis

[0776] Compositions and methods are described for the delivery of HuPTM mAbs and antigen-binding fragments thereof, such as HuPTM Fabs, that bind to superoxide dismutase 1 (SOD1) that may have benefit in treating AD and amyotrophic lateral sclerosis (ALS). In particular embodiments, the HuPTM mAb is NI-204, or an antigen binding fragment of NI-204. The amino acid sequences of Fab fragments of this antibody are provided in FIGS. 7A and B. Delivery may be accomplished via gene therapy—e.g., by administering a viral vector or other DNA expression construct encoding an SOD1-binding HuPTM mAb (or an antigen binding fragment and/or a hyperglycosylated derivative or other derivative, thereof) to patients (human subjects) diagnosed with, or having one or more symptoms of AD or ALS to create a permanent depot that continuously supplies the human PTM, e.g., human-glycosylated, transgene product.

[0777] Transgenes

[0778] Provided are recombinant vectors containing a transgene encoding a HuPTM mAb or HuPTM Fab (or other antigen binding fragment of the HuPTM mAb) that binds to SOD1 that can be administered to deliver the HuPTM mAb or antigen binding fragment in a patient. The transgene is a nucleic acid comprising the nucleotide sequences encoding an antigen binding fragment of an antibody that binds to SOD1, such as NI-204, or variants there of as detailed herein. The transgene may also encode an anti-SOD1 antigen binding fragment that contains additional glycosylation sites (e.g., see Courtois et al., 2016, mAbs 8: 99-112 which is incorporated by reference herein in its entirety).

[0779] In certain embodiments, the anti-SOD1 antigen-binding fragment transgene comprises the nucleotide sequences encoding the heavy and light chains of the Fab portion of NI-204 (10D12) (having amino acid sequences of SEQ ID NOs. 21 and 22, respectively, see Table 5 and FIG. 7A). The nucleotide sequences may be codon optimized for expression in human cells. Nucleotide sequences may, for example, comprise the nucleotide sequences of SEQ ID NO: 91 (encoding the NI-202 (10D12) heavy chain Fab portion) and SEQ ID NO: 92 (encoding the NI-202 (10D12) light chain Fab portion) as set forth in Table 6. The heavy and light chain sequences both have a signal or leader sequence at the N-terminus appropriate for expression and secretion in human cells, in particular, human CNS cells. The signal sequence may have the amino acid sequence of MYRMQLLLLIALSLALVTNS (SEQ ID NO: 146) or the one of the sequences found in Table 2 supra.

[0780] In addition to the heavy and light chain variable domain and C_{H}1 and C_{L} sequences, the transgenes may comprise, at the C-terminus of the heavy chain C_{H}1 sequence, all or a portion of the hinge region. In specific embodiments, the anti-SOD1-antigen binding domain has a heavy chain Fab fragment of SEQ ID NO: 21 with additional hinge region sequence starting after the C-terminal valine (V), contains all or a portion of the amino acid sequence EPKSCDKTHTCPPCPAPEAAGG (SEQ ID NO: 210), and specifically, EPKSCDKTHL (SEQ ID NO: 196), EPKSCDKTHT (SEQ ID NO: 197), EPKSCDKTHTCPPCPA (SEQ ID NO: 198), EPKSCDKTHLCPPCPA (SEQ ID NO: 199), EPKSCDKTHTCPPCPAPEAAGGPSVFL (SEQ ID NO: 212) or EPKSCDKTHLCPPCPAPEAAGGPSVFL (SEQ ID NO: 213) as set forth in FIG. 3. These hinge regions may be encoded by nucleotide sequences at the 3′ end of SEQ ID NO: 91 by the hinge region encoding sequences set forth in Table 6 (SEQ ID NO: 91). In another embodiment, the transgenes comprise the amino acid sequences encoding the full length (or substantially full length) heavy and light chains of the antibody, comprising the Fc domain at the C terminus of the heavy chain, e.g., having an amino acid sequence of SEQ ID NO; 295, or an IgG1 Fc domain, such as SEQ ID No. 283 or as depicted in FIG. 23, or a mutant or variant thereof. The Fc domain may be engineered for altered binding to one or more Fc receptors and/or effector function as disclosed in Section 5.1.9, infra.

[0781] In certain embodiments, the anti-SOD1 antigen-binding fragment transgene encodes an SOD1 antigen-binding fragment comprising a light chain comprising an amino acid sequence that is at least 85%, 86%, 87%, 88%, 89%, 90%, 91%, 92%, 93%, 94%, 95%, 96%, 97%, 98% or 99% identical to the sequence set forth in SEQ ID NO: 22. In certain embodiments, the anti-SOD1 antigen-binding fragment transgene encodes an SOD1 antigen-binding fragment comprising a heavy chain comprising an amino acid sequence that is at least 85%, 86%, 87%, 88%, 89%, 90%, 91%, 92%, 93%, 94%, 95%, 96%, 97%, 98% or 99% identical to the sequence set forth in SEQ ID NO: 21. In certain embodiments, the anti-SOD1 antigen-binding fragment transgene encodes an antigen-binding fragment comprising a light chain comprising an amino acid sequence that is at least 85%, 86%, 87%, 88%, 89%, 90%, 91%, 92%, 93%, 94%, 95%, 96%, 97%, 98% or 99% identical to the sequence set forth in SEQ ID NO: 22 and a heavy chain comprising an amino acid sequence that is at least 85%, 86%, 87%, 88%, 89%, 90%, 91%, 92%, 93%, 94%, 95%, 96%, 97%, 98% or 99% identical to the sequence set forth in SEQ ID NO: 21. In specific embodiments, the SOD1 antigen binding fragment comprises a heavy chain comprising an amino acid sequence of SEQ ID NO: 21 with 1, 2, 3, 4, 5, 6, 7, 8, 9, 10, 11, 12, 13, 14, 15 or more amino acid substitutions, insertions or deletions, and the substitutions, insertions or deletions are made, e.g., in the framework regions (e.g., those regions outside of the CDRs, which CDRs are underlined in FIG. 7A) or are substitutions with an amino acid present at that position in the heavy chain of one or more of the other therapeutic antibodies, for example, as identified by the alignment in FIG. 20A. In specific embodiments, the SOD1 antigen binding fragment comprises a light chain comprising an amino acid sequence of SEQ ID NO: 22 with 1, 2, 3, 4, 5, 6, 7, 8, 9, 10, 11, 12, 13, 14, 15 or more amino acid substitutions, insertions or deletions, and the substitutions, insertions or deletions are made, e.g., in the framework regions (e.g., those regions outside of the CDRs, which CDRs are underlined in FIG. 7A) or are substitutions with an amino acid present at that position in the light chain of one or more of the other therapeutic antibodies, for example, as identified by the alignment in FIG. 20B.

[0782] In certain embodiments, the anti-SOD1 antigen-binding fragment transgene encodes a hyperglycosylated NI-202 (10D12) Fab, comprising a heavy chain and a light chain of SEQ ID NOs: 21 and 22, respectively, with one or more of the following mutations: L121N (heavy chain), Q159N or Q159S (light chain), and/or E194N (light chain) (see FIG. 20A (heavy chain) and B (light chain)).

[0783] In certain embodiments, the anti-SOD1 antigen-binding fragment transgene encodes an antigen-binding fragment and comprises the nucleotide sequences encoding the six NI-202 (10D12) CDRs which are underlined in the heavy and light chain variable domain sequences of FIG. 7A which are spaced between framework regions, generally human framework regions, and associated with constant domains depending upon the form of the antigen-binding molecule, as is known in the art to form the heavy and/or light chain variable domain of an anti-SOD1 antibody or antigen-binding fragment thereof.

[0784] In certain embodiments, the anti-SOD1 antigen-binding fragment transgene comprises the nucleotide sequences encoding the heavy and light chains of the Fab portion of NI-204 (12G7) (having amino acid sequences of SEQ ID NOs. 23 and 24, respectively, see Table 5 and FIG. 7B). The nucleotide sequences may be codon optimized for expression in human cells. Nucleotide sequences may, for example, comprise the nucleotide sequences of SEQ ID NO: 93 (encoding the NI-202 (12G7) heavy chain Fab portion) and SEQ ID NO: 94 (encoding the NI-202 (12G7) light chain Fab portion) as set forth in Table 6. The heavy and light chain sequences both have a signal or leader sequence at the N-terminus appropriate for expression and secretion in human cells, in particular, human CNS cells. The signal sequence may have the amino acid sequence of MYRMQLLLLIALSLALVTNS (SEQ ID NO: 146) or the one of the sequences found in Table 2 supra.

[0785] In addition to the heavy and light chain variable domain and C_{H}1 and C_{L} domain sequences, the transgenes may comprise, at the C-terminus of the heavy chain C_{H}1 domain sequence, all or a portion of the hinge region. In specific embodiments, the anti-SOD1-antigen binding domain has a heavy chain Fab fragment of SEQ ID NO: 23 with additional hinge region sequence starting after the C-terminal valine (V), contains all or a portion of the amino acid sequence EPKSCDKTHTCPPCPAPEAAGG (SEQ ID NO: 210), and specifically, EPKSCDKTHL (SEQ ID NO: 196), EPKSCDKTHT (SEQ ID NO: 197), EPKSCDKTHTCPPCPA (SEQ ID NO: 198), EPKSCDKTHLCPPCPA (SEQ ID NO: 199), EPKSCDKTHTCPPCPAPEAAGGPSVFL (SEQ ID NO: 212) or EPKSCDKTHLCPPCPAPEAAGGPSVFL (SEQ ID NO: 213) as set forth in FIG. 7B. These hinge regions may be encoded by nucleotide sequences at the 3′ end of SEQ ID NO: 93 by the hinge region encoding sequences set forth in Table 6 (SEQ ID NO: 93). In another embodiment, the transgenes comprise the amino acid sequences encoding the full length (or substantially full length) heavy and light chains of the antibody, comprising the Fc domain at the C terminus of the heavy chain, e.g., an IgG1 Fc domain, such as SEQ ID No. 283 or as depicted in FIG. 23, or a mutant or variant thereof. The Fc domain may be engineered for altered binding to one or more Fc receptors and/or effector function as disclosed in Section 5.1.9, infra.

[0786] In certain embodiments, the anti-SOD1 antigen-binding fragment transgene encodes an SOD1 antigen-binding fragment comprising a light chain comprising an amino acid sequence that is at least 85%, 86%, 87%, 88%, 89%, 90%, 91%, 92%, 93%, 94%, 95%, 96%, 97%, 98% or 99% identical to the sequence set forth in SEQ ID NO: 24. In certain embodiments, the anti-SOD1 antigen-binding fragment transgene encodes an SOD1 antigen-binding fragment comprising a heavy chain comprising an amino acid sequence that is at least 85%, 86%, 87%, 88%, 89%, 90%, 91%, 92%, 93%, 94%, 95%, 96%, 97%, 98% or 99% identical to the sequence set forth in SEQ ID NO: 23. In certain embodiments, the anti-SOD1 antigen-binding fragment transgene encodes an antigen-binding fragment comprising a light chain comprising an amino acid sequence that is at least 85%, 86%, 87%, 88%, 89%, 90%, 91%, 92%, 93%, 94%, 95%, 96%, 97%, 98% or 99% identical to the sequence set forth in SEQ ID NO: 24 and a heavy chain comprising an amino acid sequence that is at least 85%, 86%, 87%, 88%, 89%, 90%, 91%, 92%, 93%, 94%, 95%, 96%, 97%, 98% or 99% identical to the sequence set forth in SEQ ID NO: 23. In specific embodiments, the SOD1 antigen binding fragment comprises a heavy chain comprising an amino acid sequence of SEQ ID NO: 23 with 1, 2, 3, 4, 5, 6, 7, 8, 9, 10, 11, 12, 13, 14, 15 or more amino acid substitutions, insertions or deletions, and the substitutions, insertions or deletions are made, e.g., in the framework regions (e.g., those regions outside of the CDRs, which CDRs are underlined in FIG. 7B) or are substitutions with an amino acid present at that position in the heavy chain of one or more of the other therapeutic antibodies, for example, as identified by the alignment in FIG. 20A. In specific embodiments, the SOD1 antigen binding fragment comprises a light chain comprising an amino acid sequence of SEQ ID NO: 24 with 1, 2, 3, 4, 5, 6, 7, 8, 9, 10, 11, 12, 13, 14, 15 or more amino acid substitutions, insertions or deletions, and the substitutions, insertions or deletions are made, e.g., in the framework regions (e.g., those regions outside of the CDRs, which CDRs are underlined in FIG. 7B) or are substitutions with an amino acid present at that position in the light chain of one or more of the other therapeutic antibodies, for example, as identified by the alignment in FIG. 20B.

[0787] In certain embodiments, the anti-SOD1 antigen-binding fragment transgene encodes a hyperglycosylated NI-202 (12G7) Fab, comprising a heavy chain and a light chain of SEQ ID NOs: 23 and 24, respectively, with one or more of the following mutations: L118N (heavy chain) and/or Q196N (light chain) (see FIGS. 20A (heavy chain) and 20B (light chain)).

[0788] In certain embodiments, the anti-SOD1 antigen-binding fragment transgene encodes an antigen-binding fragment and comprises the nucleotide sequences encoding the six NI-202 (12G7) CDRs which are underlined in the heavy and light chain variable domain sequences of FIG. 7B which are spaced between framework regions, generally human framework regions, and associated with constant domains depending upon the form of the antigen-binding molecule, as is known in the art to form the heavy and/or light chain variable domain of an anti-SOD1 antibody or antigen-binding fragment thereof.

[0789] Gene Therapy Methods

[0790] Provided are methods of treating human subjects for AD or ALS by administration of a viral vector containing a transgene encoding an anti-SOD1 antibody, or antigen binding fragment thereof. The antibody may be NI-202 and is, e.g., a Fab fragment thereof, or other antigen-binding fragment thereof. In certain embodiments, the patient has been diagnosed with and/or has symptoms associated with prodromal AD, e.g., a mild cognitive impairment associated with early AD or even pre-AD, or ALS.

[0791] Recombinant vectors used for delivering the transgene are described in Section 5.4.1. Such vectors should have a tropism for human CNS cells and can include non-replicating rAAV, particularly those bearing an AAV9, AAVrh10, AAVrh20, AAVrh39, or AAVcy5 capsid. The recombinant vectors can be administered in any manner such that the recombinant vector enters the CNS, e.g., by introducing the recombinant vector into the cerebral spinal fluid (CSF). See Section 5.5.1 for details regarding the methods of treatment.

[0792] Subjects to whom such gene therapy is administered can be those responsive to anti-SOD1 therapy. In certain embodiments, the methods encompass treating patients who have been diagnosed with AD or ALS, or have one or more symptoms associated therewith, and identified as responsive to treatment with an anti-SOD1 antibody or considered a good candidate for therapy with an anti-SOD1 antibody. In specific embodiments, the patients have previously been treated with NI-202 and have been found to be responsive to NI-202. To determine responsiveness, the anti-SOD1 antibody or antigen-binding fragment transgene product (e.g., produced in human cell culture, bioreactors, etc.) may be administered directly to the subject.

[0793] Human Post Translationally Modified Antibodies

[0794] The production of the anti-SOD1 HuPTM mAb or HuPTM Fab, should result in a “biobetter” molecule for the treatment of AD or ALS accomplished via gene therapy—e.g., by administering a viral vector or other DNA expression construct encoding the anti-SOD1 HuPTM Fab, intrathecally, particularly intracisternal or lumbar administration, or intravenous administration to human subjects (patients) diagnosed with or having one or more symptoms of AD or ALS, to create a permanent depot in the CNS that continuously supplies the fully-human post-translationally modified, e.g., human-glycosylated, sulfated transgene product produced by transduced CNS cells.

[0795] The cDNA construct for the anti-SOD1 HuPTMmAb or anti-SOD1 HuPTM Fab should include a signal peptide that ensures proper co- and post-translational processing (glycosylation and protein sulfation) by the transduced CNS cells. For example, the signal sequence may be MYRMQLLLLIALSLALVTNS (SEQ ID NO: 146).

[0796] As an alternative, or an additional treatment to gene therapy, the anti-SOD1 HuPTM mAb or HuPTM Fab can be produced in human cell lines by recombinant DNA technology, and administered to patients diagnosed with AD or ALS, or for whom therapy for AD or ALS is considered appropriate.

[0797] In specific embodiments, the anti-SOD1 HuPTM mAb or antigen-binding fragment thereof has heavy and light chains with the amino acid sequences of the heavy and light chain Fab portions of NI-202 (10D12) as set forth in FIG. 7A (with glutamine (Q) glycosylation sites; asparaginal (N) glycosylation sites, non-consensus asparaginal (N) glycosylation sites; and tyrosine-O-sulfation sites (Y) are as indicated in the legend has glycosylation, particularly a 2,6-sialylation, at one or more of the amino acid positions N110 and/or N168 of the heavy chain (SEQ ID NO: 21) or Q99, N157 and/or N209 of the light chain (SEQ ID NO: 22). Alternatively or in addition to, the HuPTM mAb or antigen binding-fragment thereof with the heavy and light chain variable domain sequences of NI-204 has a sulfation group at Y94 of the heavy chain (SEQ ID NO: 21) or Y85 and/or Y86 of the light chain (SEQ ID NO: 22). In other embodiments, the anti-SOD1 HuPTM mAb or antigen-binding fragment thereof does not contain any detectable (e.g., as detected by assays known in the art, for example, those described in section 5.2, infra) NeuGc moieties and/or does not contain any detectable (e.g., as detected by assays known in the art, for example, those described in section 5.2, infra) alpha-Gal moieties. In certain embodiments, the HuPTM mAb is a full length or substantially full length mAb with an Fc region.

[0798] In specific embodiments, the anti-SOD1 HuPTM mAb or antigen-binding fragment thereof has heavy and light chains with the amino acid sequences of the heavy and light chain Fab portions of NI-202 (12G7) as set forth in FIG. 7B (with glutamine (Q) glycosylation sites; asparaginal (N) glycosylation sites, non-consensus asparaginal (N) glycosylation sites; and tyrosine-O-sulfation sites (Y) are as indicated in the legend) has glycosylation, particularly a 2,6-sialylation, at one or more of the amino acid positions N110 and/or N168 of the heavy chain (SEQ ID NO: 23) or Q99, N157 and/or N209 of the light chain (SEQ ID NO: 24). Alternatively or in addition to, the HuPTM mAb or antigen binding-fragment thereof with the heavy and light chain variable domain sequences of NI-204 has a sulfation group at Y94 of the heavy chain (SEQ ID NO: 23) or Y85 and/or Y86 of the light chain (SEQ ID NO: 24). In other embodiments, the anti-SOD1 HuPTM mAb or antigen-binding fragment thereof does not contain any detectable (e.g., as detected by assays known in the art, for example, those described in section 5.2, infra) NeuGc moieties and/or does not contain any detectable (e.g., as detected by assays known in the art, for example, those described in section 5.2, infra) alpha-Gal moieties. In certain embodiments, the HuPTM mAb is a full length or substantially full length mAb with an Fc region.

[0799] In certain embodiments, the HuPTM mAb or Fab is therapeutically effective and is at least 0.5%, 1% or 2% 2,6 sialylated and/or sulfated and may be at least 5%, 10% or even 50% or 100% glycosylated 2,6 sialylation and/or sulfated. The goal of gene therapy treatment provided herein is to slow or arrest the progression of AD or ALS. In the case of AD, efficacy may be monitored by measuring a reduction in plaque formation and/or an improvement in cognitive function or a reduction in the decline in cognitive function. In the case of ALS, efficacy may be monitored by measuring an improvement in speech and/or a reduction of clumsiness, abnormal limb fatigue, and/or muscle cramps and twitches.

[0800] Combinations of delivery of the anti-SOD1 HuPTM mAb or antigen-binding fragment thereof, to the CNS accompanied by delivery of other available treatments are encompassed by the methods provided herein. The additional treatments may be administered before, concurrently or subsequent to the gene therapy treatment. Available treatments for AD that could be combined with the gene therapy provided herein include but are not limited to ARICEPT® (donepezil), RAZADYNE® (galantamine), NAMENDA® (rivastigmine), and NAMZARIC® (donepezil and memantine), to name a few, and administration with anti-SOD1 agents, including but not limited to NI-204. Available treatments for ALS that could be combined with the gene therapy provided herein include but are not limited to RILUTEK® (riluzole), RADICAVA® (edaravone), TIGLUTIK® (riluzole), and NUDEXTRA® (dextromethorphan HBr and quinidine sulfate), to name a few, and administration with anti-SOD1 agents, including but not limited to NI-204.

### 5.3.7. Anti-CGRPR HuPTM Constructs and Formulations for Migraines and Cluster Headaches

[0801] Compositions and methods are described for the delivery of HuPTM mAbs and antigen-binding fragments thereof, such as HuPTM Fabs, that bind to calcitonin gene-related peptide receptor (CGRPR) that may have benefit in treating migraines and cluster headaches (referred to collectively as headache disorders). In certain embodiments, the HuPTM mAb is eptinezumab, fremanezumab, galcanezumab or an antigen binding fragment of one of the foregoing. The amino acid sequences of Fab fragments of these antibodies are provided in FIGS. 8A-C. Delivery may be accomplished via gene therapy—e.g., by administering a viral vector or other DNA expression construct encoding an CGRPR-binding HuPTM mAb (or an antigen binding fragment and/or a hyperglycosylated derivative or other derivative, thereof) to patients (human subjects) diagnosed with, or having one or more symptoms of, migraines and cluster headaches, to create a permanent depot that continuously supplies the human PTM, e.g., human-glycosylated, transgene product.

[0802] Transgenes

[0803] Provided are recombinant vectors containing a transgene encoding a HuPTM mAb or HuPTM Fab (or other antigen binding fragment of the HuPTM mAb) that binds to CGRPR that can be administered to deliver the HuPTM mAb or antigen binding fragment in a patient. The transgene is a nucleic acid comprising the nucleotide sequences encoding an antigen binding fragment of an antibody that binds to CGRPR, such as eptinezumab, fremanezumab, galcanezumab or variants thereof as detailed herein or in accordance with the details herein. The transgene may also encode anti-CGRPR antigen binding fragment that contains additional glycosylation sites (e.g., see Courtois et al., 2016, mAbs 8: 99-112 which is incorporated by reference herein in its entirety).

[0804] In certain embodiments, the anti-CGRPR antigen-binding fragment transgene comprises the nucleotide sequences encoding the heavy and light chains of the Fab portion of eptinezumab (having amino acid sequences of SEQ ID NOs. 25 and 26, respectively, see Table 5 and FIG. 8A). The nucleotide sequences may be codon optimized for expression in human cells. Nucleotide sequences may, for example, comprise the nucleotide sequences of SEQ ID NO: 95 (encoding the eptinezumab heavy chain Fab portion) and SEQ ID NO: 96 (encoding the eptinezumab light chain Fab portion) as set forth in Table 6. The heavy and light chain sequences both have a signal or leader sequence at the N-terminus appropriate for expression and secretion in human cells, in particular, human CNS cells. The signal sequence may have the amino acid sequence of MYRMQLLLLIALSLALVTNS (SEQ ID NO: 146) or the one of the sequences found in Table 2 supra.

[0805] In addition to the heavy and light chain variable domain and C_{H}1 and C_{L} domain sequences, the transgenes may comprise, at the C-terminus of the heavy chain C_{H}1 domain sequence, all or a portion of the hinge region. In specific embodiments, the anti-CGRPR-antigen binding domain has a heavy chain Fab fragment of SEQ ID NO: 25 with additional hinge region sequence starting after the C-terminal valine (V), contains all or a portion of the amino acid sequence EPKSCDKTHTCPPCPAPELLGG (SEQ ID NO: 194), and specifically, EPKSCDKTHL (SEQ ID NO: 196), EPKSCDKTHT (SEQ ID NO: 197), EPKSCDKTHTCPPCPA (SEQ ID NO: 198), EPKSCDKTHLCPPCPA (SEQ ID NO: 199), EPKSCDKTHTCPPCPAPELLGGPSVFL (SEQ ID NO: 200) or EPKSCDKTHLCPPCPAPELLGGPSVFL (SEQ ID NO: 201) as set forth in FIG. 8A. These hinge regions may be encoded by nucleotide sequences at the 3′ end of SEQ ID NO: 95 by the hinge region encoding sequences set forth in Table 6 (SEQ ID NO: 95). In another embodiment, the transgenes comprise the amino acid sequences encoding the full length (or substantially full length) heavy and light chains of the antibody, comprising the Fc domain at the C terminus of the heavy chain, e.g., having an amino acid sequence of SEQ ID NO: 296 (Table 7) or an IgG1 Fc domain, such as SEQ ID No. 283 or as depicted in FIG. 23, or a mutant or variant thereof. The Fc domain may be engineered for altered binding to one or more Fc receptors and/or effector function as disclosed in Section 5.1.9, infra.

[0806] In certain embodiments, the anti-CGRPR antigen-binding fragment transgene encodes a CGRPR antigen-binding fragment comprising a light chain comprising an amino acid sequence that is at least 85%, 86%, 87%, 88%, 89%, 90%, 91%, 92%, 93%, 94%, 95%, 96%, 97%, 98% or 99% identical to the sequence set forth in SEQ ID NO: 26. In certain embodiments, the anti-CGRPR antigen-binding fragment transgene encodes a CGRPR antigen-binding fragment comprising a heavy chain comprising an amino acid sequence that is at least 85%, 86%, 87%, 88%, 89%, 90%, 91%, 92%, 93%, 94%, 95%, 96%, 97%, 98% or 99% identical to the sequence set forth in SEQ ID NO: 25. In certain embodiments, the anti-CGRPR antigen-binding fragment transgene encodes an antigen-binding fragment comprising a light chain comprising an amino acid sequence that is at least 85%, 86%, 87%, 88%, 89%, 90%, 91%, 92%, 93%, 94%, 95%, 96%, 97%, 98% or 99% identical to the sequence set forth in SEQ ID NO: 26 and a heavy chain comprising an amino acid sequence that is at least 85%, 86%, 87%, 88%, 89%, 90%, 91%, 92%, 93%, 94%, 95%, 96%, 97%, 98% or 99% identical to the sequence set forth in SEQ ID NO: 25. In specific embodiments, the CGRPR antigen-binding fragment comprises a heavy chain comprising an amino acid sequence of SEQ ID NO: 25 with 1, 2, 3, 4, 5, 6, 7, 8, 9, 10, 11, 12, 13, 14, 15 or more amino acid substitutions, insertions or deletions, and the substitutions, insertions or deletions are made, e.g., in the framework regions (e.g., those regions outside of the CDRs, which CDRs are underlined in FIG. 8A) or are substitutions with an amino acid present at that position in the heavy chain of one or more of the other therapeutic antibodies, for example, as identified by the alignment in FIG. 20A. In specific embodiments, the CGRPR antigen-binding fragment comprises a light chain comprising an amino acid sequence of SEQ ID NO: 26 with 1, 2, 3, 4, 5, 6, 7, 8, 9, 10, 11, 12, 13, 14, 15 or more amino acid substitutions, insertions or deletions, and the substitutions, insertions or deletions are made, e.g., in the framework regions (e.g., those regions outside of the CDRs, which CDRs are underlined in FIG. 8A) or are substitutions with an amino acid present at that position in the light chain of one or more of the other therapeutic antibodies, for example, as identified by the alignment in FIG. 20B.

[0807] In certain embodiments, the anti-CGRPR antigen-binding fragment transgene encodes a hyperglycosylated eptinezumab Fab, comprising a heavy chain and a light chain of SEQ ID NOs: 25 and 26, respectively, with one or more of the following mutations: L106N (heavy chain), Q165N or Q165S (light chain), and/or E200N (light chain) (see FIGS. 20A (heavy chain) and 20B (light chain)).

[0808] In certain embodiments, the anti-CGRPR antigen-binding fragment transgene encodes an antigen-binding fragment and comprises the nucleotide sequences encoding the six eptinezumab CDRs which are underlined in the heavy and light chain variable domain sequences of FIG. 8A which are spaced between framework regions, generally human framework regions, and associated with constant domains depending upon the form of the antigen-binding molecule, as is known in the art to form the heavy and/or light chain variable domain of an anti-CGRPR antibody or antigen-binding fragment thereof.

[0809] In certain embodiments, the anti-CGRPR antigen-binding fragment transgene comprises the nucleotide sequences encoding the heavy and light chains of the Fab portion of fremanezumab (having amino acid sequences of SEQ ID NOs. 27 and 28, respectively, see Table 5 and FIG. 8B). The nucleotide sequences may be codon optimized for expression in human cells. Nucleotide sequences may, for example, comprise the nucleotide sequences of SEQ ID NO: 97 (encoding the fremanezumab heavy chain Fab portion) and SEQ ID NO: 98 (encoding the fremanezumab light chain Fab portion) as set forth in Table 6. The heavy and light chain sequences both have a signal or leader sequence at the N-terminus appropriate for expression and secretion in human cells, in particular, human CNS cells. The signal sequence may have the amino acid sequence of MYRMQLLLLIALSLALVTNS (SEQ ID NO: 146) or the one of the sequences found in Table 2 supra.

[0810] In addition to the heavy and light chain variable domain and C_{H}1 and C_{L} sequences, the transgenes may comprise, at the C-terminus of the heavy chain C_{H}1 domain sequence, all or a portion of the hinge region. In specific embodiments, the anti-CGRPR-antigen binding domain has a heavy chain Fab fragment of SEQ ID NO: 27 with additional hinge region sequence starting after the C-terminal valine (V), contains all or a portion of the amino acid sequence ERKCCVECPPCPAPPVAG (SEQ ID NO: 220) or ERKCCVECPPCPA (SEQ ID NO: 221) as set forth in FIG. 8B. These hinge regions may be encoded by nucleotide sequences at the 3′ end of SEQ ID NO: 97 by the hinge region encoding sequences set forth in Table 6 (SEQ ID NO: 97). In another embodiment, the transgenes comprise the amino acid sequences encoding the full length (or substantially full length) heavy and light chains of the antibody, comprising the Fc domain at the C terminus of the heavy chain, e.g., having an amino acid sequence of SEQ ID NO: 297 (Table 7) or an IgG2 Fc domain, such as SEQ ID No. 284 or as depicted in FIG. 23, or a mutant or variant thereof. The Fc domain may be engineered for altered binding to one or more Fc receptors and/or effector function as disclosed in Section 5.1.9, infra.

[0811] In certain embodiments, the anti-CGRPR antigen-binding fragment transgene encodes a CGRPR antigen-binding fragment comprising a light chain comprising an amino acid sequence that is at least 85%, 86%, 87%, 88%, 89%, 90%, 91%, 92%, 93%, 94%, 95%, 96%, 97%, 98% or 99% identical to the sequence set forth in SEQ ID NO: 28. In certain embodiments, the anti-CGRPR antigen-binding fragment transgene encodes a CGRPR antigen-binding fragment comprising a heavy chain comprising an amino acid sequence that is at least 85%, 86%, 87%, 88%, 89%, 90%, 91%, 92%, 93%, 94%, 95%, 96%, 97%, 98% or 99% identical to the sequence set forth in SEQ ID NO: 27. In certain embodiments, the anti-CGRPR antigen-binding fragment transgene encodes an antigen-binding fragment comprising a light chain comprising an amino acid sequence that is at least 85%, 86%, 87%, 88%, 89%, 90%, 91%, 92%, 93%, 94%, 95%, 96%, 97%, 98% or 99% identical to the sequence set forth in SEQ ID NO: 28 and a heavy chain comprising an amino acid sequence that is at least 85%, 86%, 87%, 88%, 89%, 90%, 91%, 92%, 93%, 94%, 95%, 96%, 97%, 98% or 99% identical to the sequence set forth in SEQ ID NO: 27. In specific embodiments, the CGRPR antigen-binding fragment comprises a heavy chain comprising an amino acid sequence of SEQ ID NO: 27 with 1, 2, 3, 4, 5, 6, 7, 8, 9, 10, 11, 12, 13, 14, 15 or more amino acid substitutions, insertions or deletions, and the substitutions, insertions or deletions are made, e.g., in the framework regions (e.g., those regions outside of the CDRs, which CDRs are underlined in FIG. 8B) or are substitutions with an amino acid present at that position in the heavy chain of one or more of the other therapeutic antibodies, for example, as identified by the alignment in FIG. 20A. In specific embodiments, the CGRPR antigen-binding fragment comprises a light chain comprising an amino acid sequence of SEQ ID NO: 28 with 1, 2, 3, 4, 5, 6, 7, 8, 9, 10, 11, 12, 13, 14, 15 or more amino acid substitutions, insertions or deletions, and the substitutions, insertions or deletions are made, e.g., in the framework regions (e.g., those regions outside of the CDRs, which CDRs are underlined in FIG. 8B) or are substitutions with an amino acid present at that position in the light chain of one or more of the other therapeutic antibodies, for example, as identified by the alignment in FIG. 20B.

[0812] In certain embodiments, the anti-CGRPR antigen-binding fragment transgene encodes a hyperglycosylated fremanezumab Fab, comprising a heavy chain and a light chain of SEQ ID NOs: 27 and 28, respectively, with one or more of the following mutations: L117N (heavy chain), Q160N or Q160S (light chain), and/or E195N (light chain) (see FIGS. 20A (heavy chain) and 20B (light chain)).

[0813] In certain embodiments, the anti-CGRPR antigen-binding fragment transgene encodes an antigen-binding fragment and comprises the nucleotide sequences encoding the six fremanezumab CDRs which are underlined in the heavy and light chain variable domain sequences of FIG. 8B which are spaced between framework regions, generally human framework regions, and associated with constant domains depending upon the form of the antigen-binding molecule, as is known in the art to form the heavy and/or light chain variable domain of an anti-CGRPR antibody or antigen-binding fragment thereof.

[0814] In certain embodiments, the anti-CGRPR antigen-binding fragment transgene comprises the nucleotide sequences encoding the heavy and light chains of the Fab portion of galcanezumab (having amino acid sequences of SEQ ID NOs. 29 and 30, respectively, see Table 5 and FIG. 8C). The nucleotide sequences may be codon optimized for expression in human cells. Nucleotide sequences may, for example, comprise the nucleotide sequences of SEQ ID NO: 99 (encoding the galcanezumab heavy chain Fab portion) and SEQ ID NO: 100 (encoding the galcanezumab light chain Fab portion) as set forth in Table 6. The heavy and light chain sequences both have a signal or leader sequence at the N-terminus appropriate for expression and secretion in human cells, in particular, human CNS cells. The signal sequence may have the amino acid sequence of MYRMQLLLLIALSLALVTNS (SEQ ID NO: 146) or the one of the sequences found in Table 2 supra.

[0815] In addition to the heavy and light chain variable domain and C_{H}1 and C_{L} domain sequences, the transgenes may comprise, at the C-terminus of the heavy chain C_{H}1 domain sequence, all or a portion of the hinge region. In specific embodiments, the anti-CGRPR-antigen binding domain has a heavy chain Fab domain of SEQ ID NO: 29 with additional hinge region sequence starting after the C-terminal valine (V), contains all or a portion of the amino acid sequence contains all or a portion of the amino acid sequence ESKYGPPCPPCPAPEAAGG (SEQ ID NO: 431) or ESKYGPPCPSCPAPEAAGG (SEQ ID NO: 432) as set forth in FIG. 8C. These hinge regions may be encoded by nucleotide sequences at the 3′ end of SEQ ID NO: 99 by the hinge region encoding sequences set forth in Table 6 (SEQ ID NO: 99). In another embodiment, the transgenes comprise the amino acid sequences encoding the full length (or substantially full length) heavy and light chains of the antibody, comprising the Fc domain at the C terminus of the heavy chain, e.g., having an amino acid sequence of SEQ ID NO: 298 (Table 7) or an IgG4 Fc domain, such as SEQ ID No. 285 or as depicted in FIG. 23, or a mutant or variant thereof. The Fc domain may be engineered for altered binding to one or more Fc receptors and/or effector function as disclosed in Section 5.1.9, infra.

[0816] In certain embodiments, the anti-CGRPR antigen-binding fragment transgene encodes a CGRPR antigen-binding fragment comprising a light chain comprising an amino acid sequence that is at least 85%, 86%, 87%, 88%, 89%, 90%, 91%, 92%, 93%, 94%, 95%, 96%, 97%, 98% or 99% identical to the sequence set forth in SEQ ID NO: 30. In certain embodiments, the anti-CGRPR antigen-binding fragment transgene encodes a CGRPR antigen-binding fragment comprising a heavy chain comprising an amino acid sequence that is at least 85%, 86%, 87%, 88%, 89%, 90%, 91%, 92%, 93%, 94%, 95%, 96%, 97%, 98% or 99% identical to the sequence set forth in SEQ ID NO: 29. In certain embodiments, the anti-CGRPR antigen-binding fragment transgene encodes an antigen-binding fragment comprising a light chain comprising an amino acid sequence that is at least 85%, 86%, 87%, 88%, 89%, 90%, 91%, 92%, 93%, 94%, 95%, 96%, 97%, 98% or 99% identical to the sequence set forth in SEQ ID NO: 30 and a heavy chain comprising an amino acid sequence that is at least 85%, 86%, 87%, 88%, 89%, 90%, 91%, 92%, 93%, 94%, 95%, 96%, 97%, 98% or 99% identical to the sequence set forth in SEQ ID NO: 29. In specific embodiments, the CGRPR antigen-binding fragment comprises a heavy chain comprising an amino acid sequence of SEQ ID NO: 29 with 1, 2, 3, 4, 5, 6, 7, 8, 9, 10, 11, 12, 13, 14, 15 or more amino acid substitutions, insertions or deletions, and the substitutions, insertions or deletions are made, e.g., in the framework regions (e.g., those regions outside of the CDRs, which CDRs are underlined in FIG. 8C) or are substitutions with an amino acid present at that position in the heavy chain of one or more of the other therapeutic antibodies, for example, as identified by the alignment in FIG. 20A. In specific embodiments, the CGRPR antigen-binding fragment comprises a light chain comprising an amino acid sequence of SEQ ID NO: 30 with 1, 2, 3, 4, 5, 6, 7, 8, 9, 10, 11, 12, 13, 14, 15 or more amino acid substitutions, insertions or deletions, and the substitutions, insertions or deletions are made, e.g., in the framework regions (e.g., those regions outside of the CDRs, which CDRs are underlined in FIG. 8C) or are substitutions with an amino acid present at that position in the light chain of one or more of the other therapeutic antibodies, for example, as identified by the alignment in FIG. 20B.

[0817] In certain embodiments, the anti-CGRPR antigen-binding fragment transgene encodes a hyperglycosylated galcanezumab Fab, comprising a heavy chain and a light chain of SEQ ID NOs: 29 and 30, respectively, with one or more of the following mutations: T114N (heavy chain), Q160N or Q160S, and/or E195N (light chain) (see FIGS. 20A (heavy chain) and 20B (light chain)).

[0818] In certain embodiments, the anti-CGRPR antigen-binding fragment transgene encodes an antigen-binding fragment and comprises the nucleotide sequences encoding the six galcanezumab CDRs which are underlined in the heavy and light chain variable domain sequences of FIG. 8C which are spaced between framework regions, generally human framework regions, and associated with constant domains depending upon the form of the antigen-binding molecule, as is known in the art to form the heavy and/or light chain variable domain of an anti-CGRPR antibody or antigen-binding fragment thereof.

[0819] Gene Therapy Methods

[0820] Provided are methods of treating human subjects for migraines and cluster headaches by administration of a viral vector containing a transgene encoding an anti-CGRPR antibody, or antigen binding fragment thereof. The antibody may be eptinezumab, fremanezumab, or galcanezumab and is, e.g., a Fab fragment thereof, or other antigen-binding fragment thereof or is a full length anti-CGRPR antibody with an Fc region. In certain embodiments, the patient has been diagnosed with and/or has symptoms associated with episodic migraines or chronic migraines. In certain embodiments, the patient has been diagnosed with and/or has symptoms associated with episodic cluster headaches or chronic cluster headaches. Recombinant vectors used for delivering the transgenes are described in Section 5.4.1 and shown in FIGS. 8A-C. Such vectors should have a tropism for human CNS cells and can include non-replicating rAAV, particularly those bearing an AAV9, AAVrh10, AAVrh20, AAVrh39, or AAVcy5 capsid. The recombinant vectors can be administered in any manner such that the recombinant vector enters the CNS, e.g., by introducing the recombinant vector into the cerebral spinal fluid (CSF). See Section 5.5.1 for details regarding the methods of treatment.

[0821] Subjects to whom such gene therapy is administered can be those responsive to anti-CGRPR therapy. In certain embodiments, the methods encompass treating patients who have been diagnosed with migraines or cluster headaches or have one or more symptoms associated therewith, and identified as responsive to treatment with an anti-CGRPR antibody or considered a good candidate for therapy with an anti-CGRPR antibody. In specific embodiments, the patients have previously been treated with eptinezumab, fremanezumab, or galcanezumab, and have been found to be responsive to one or more of eptinezumab, fremanezumab, and galcanezumab. To determine responsiveness, the anti-CGRPR antibody or antigen-binding fragment transgene product (e.g., produced in human cell culture, bioreactors, etc.) may be administered directly to the subject.

[0822] Human Post Translationally Modified Antibodies

[0823] The production of the anti-CGRPR HuPTM mAb or HuPTM Fab, should result in a “biobetter” molecule for the treatment of migraines or cluster headaches accomplished via gene therapy—e.g., by administering a viral vector or other DNA expression construct encoding the anti-CGRPR HuPTM Fab, intrathecally, particularly intracisternal or lumbar administration, or intravenous administration to human subjects (patients) diagnosed with or having one or more symptoms of migraines or cluster headaches, to create a permanent depot in the CNS that continuously supplies the fully-human post-translationally modified, e.g., human-glycosylated, sulfated transgene product produced by transduced CNS cells.

[0824] The cDNA construct for the anti-CGRPR HuPTM mAb or anti-CGRPR HuPTM Fab should include a signal peptide that ensures proper co- and post-translational processing (glycosylation and protein sulfation) by the transduced CNS cells. For example, the signal sequence may be MYRMQLLLLIALSLALVTNS (SEQ ID NO: 146).

[0825] As an alternative, or an additional treatment to gene therapy, the anti-CGRPR HuPTM mAb or HuPTM Fab can be produced in human cell lines by recombinant DNA technology, and administered to patients diagnosed with migraines or cluster headaches, or for whom therapy for migraines or cluster headaches is considered appropriate.

[0826] In specific embodiments, the anti-CGRPR HuPTM mAb or antigen-binding fragment thereof has heavy and light chains with the amino acid sequences of the heavy and light chain Fab portions of eptinezumab as set forth in FIG. 8A (with glutamine (Q) glycosylation sites; asparaginal (N) glycosylation sites, non-consensus asparaginal (N) glycosylation sites; and tyrosine-O-sulfation sites (Y) are as indicated in the legend) has glycosylation, particularly a 2,6-sialylation, at one or more of the amino acid positions Q103 and/or N153 of the heavy chain (SEQ ID NO: 25) or N21, N163, and/or N215 of the light chain (SEQ ID NO: 26). Alternatively or in addition to, the HuPTM mAb or antigen binding-fragment thereof with the heavy and light chain variable domain sequences of eptinezumab has a sulfation group at Y32, Y33 and/or Y93 of the heavy chain (SEQ ID NO: 25) and/or Y87 and/or Y88 of the light chain (SEQ ID NO: 26). In other embodiments, the anti-CGRPR HuPTM mAb or antigen-binding fragment thereof does not contain any detectable (e.g., as detected by assays known in the art, for example, those described in section 5.2, infra) NeuGc moieties and/or does not contain any detectable (e.g., as detected by assays known in the art, for example, those described in section 5.2, infra) alpha-Gal moieties. In certain embodiments, the HuPTM mAb is a full length or substantially full length mAb with an Fc region.

[0827] In specific embodiments, the anti-CGRPR HuPTM mAb or antigen-binding fragment thereof has heavy and light chains with the amino acid sequences of the heavy and light chain Fab portions of fremanezumab as set forth in FIG. 8B (with glutamine (Q) glycosylation sites; asparaginal (N) glycosylation sites, non-consensus asparaginal (N) glycosylation sites; and tyrosine-O-sulfation sites (Y) are as indicated in the legend) has glycosylation, particularly a 2,6-sialylation, at one or more of the amino acid positions Q114, N164, N197 and/or N206 of the heavy chain (SEQ ID NO: 27) or N93, Q100, N158, and/or N210 of the light chain (SEQ ID NO: 28). Alternatively or in addition to, the HuPTM mAb or antigen binding-fragment thereof with the heavy and light chain variable domain sequences of fremanezumab has a sulfation group at Y96, Y97 and/or Y203 of the heavy chain (SEQ ID NO: 27) or Y86 and/or Y87 of the light chain (SEQ ID NO: 28). In other embodiments, the anti-CGRPR HuPTM mAb or antigen-binding fragment thereof does not contain any detectable (e.g., as detected by assays known in the art, for example, those described in section 5.2, infra) NeuGc moieties and/or does not contain any detectable (e.g., as detected by assays known in the art, for example, those described in section 5.2, infra) alpha-Gal moieties. In certain embodiments, the HuPTM mAb is a full length or substantially full length mAb with an Fc region.

[0828] In specific embodiments, the anti-CGRPR HuPTM mAb or antigen-binding fragment thereof has heavy and light chains with the amino acid sequences of the heavy and light chain Fab portions of galcanezumab as set forth in FIG. 8C (with glutamine (Q) glycosylation sites; asparaginal (N) glycosylation sites, non-consensus asparaginal (N) glycosylation sites; and tyrosine-O-sulfation sites (Y) are as indicated in the legend) has glycosylation, particularly a 2,6-sialylation, at one or more of the amino acid positions Q111, N161, and/or N203 of the heavy chain (SEQ ID NO: 29) or N158 and/or N210 of the light chain (SEQ ID NO: 30). Alternatively or in addition to, the HuPTM mAb or antigen binding-fragment thereof with the heavy and light chain variable domain sequences of erenumab has a sulfation group at Y32 and/or Y33 and/or Y93 of the heavy chain (SEQ ID NO: 29) and/or Y86 and/or Y87 and/or Y92 of the light chain (SEQ ID NO: 30). In other embodiments, the anti-CGRPR HuPTM mAb or antigen-binding fragment thereof does not contain any detectable (e.g., as detected by assays known in the art, for example, those described in section 5.2, infra) NeuGc moieties and/or does not contain any detectable (e.g., as detected by assays known in the art, for example, those described in section 5.2, infra) alpha-Gal moieties. In certain embodiments, the HuPTM mAb is a full length or substantially full length mAb with an Fc region.

[0829] In certain embodiments, the HuPTM mAb or Fab is therapeutically effective and is at least 0.5%, 1% or 2% 2,6 sialylated and/or sulfated and may be at least 5%, 10% or even 50% or 100% glycosylated 2,6 sialylation and/or sulfated. The goal of gene therapy treatment provided herein is to prevent or reduce the intensity or frequency of migraines, cluster headaches, or one or more of the symptoms associated therewith, including nausea, light sensitivity, sound sensitivity, red eye, eyelid edema, forehead and facial sweating, tearing (lacrimation), abnormal small size of the pupil (miosis), nasal congestion, runny nose (rhinorrhea), and drooping eyelid (ptosis). Efficacy may be monitored by measuring a reduction in the intensity or frequency of migraines or cluster headaches, or a reduction in the amount of acute migraine-specific medication used over a defined period of time.

[0830] Combinations of delivery of the anti-CGRPR HuPTM mAb or antigen-binding fragment thereof, to the CNS accompanied by delivery of other available treatments are encompassed by the methods provided herein. The additional treatments may be administered before, concurrently or subsequent to the gene therapy treatment. Available treatments for cluster headaches or migraines that could be combined with the gene therapy provided herein include but are not limited to triptans, ergotamine derivatives and NSAIDs, to name a few, and administration with anti-CGRPR agents, including but not limited to eptinezumab, fremanezumab, and gal canezumab.

### 5.3.8. Anti-VEGF, Anti-EPOR, Anti-Aβ and Anti-Kallikrein HuPTM Constructs and Formulations for Ocular Disorders

[0831] Compositions and methods are described for the delivery of HuPTM mAb and antigen-binding fragments thereof, such as HuPTM Fabs, that bind to vascular endothelial growth factor (VEGF), erythropoietin receptor (EPOR), Aβ peptides derived from the amyloid precursor protein, or kallikrein, respectively, indicated for treating one or more retinal disorders including diabetic retinopathy, myopic choroidal neovascularization (mCNV), macular degeneration (e.g., neovascular (wet) or dry age-related macular degeneration (nAMD)), macular edema (e.g., macular edema following a retinal vein occlusion (RVO) or diabetic macular edema (DME)). In certain embodiments, the HuPTM mAb has the amino acid sequence of sevacizumab, LKA-651, GSK933776, lecanemab, or lanadelumab, or an antigen binding fragment of one of the foregoing. The amino acid sequences of Fab fragments of sevacizumab, LKA-651, solanezumab, GSK933776, lecanemab, and lanadelumab are provided in FIGS. 9A-C, 2A-C, and 19, respectively. Delivery may be accomplished via gene therapy—e.g., by administering a viral vector or other DNA expression construct encoding a VEGF-binding, EPOR-binding, Aβ-binding, or kallikrein-binding HuPTM mAb (or an antigen binding fragment and/or a hyperglycosylated derivative or other derivative, thereof, including an scFv) to patients (human subjects) diagnosed with, or having one or more symptoms of a retinal disorder (e.g. diabetic retinopathy, mCNV, macular degeneration, or macular edema) to create a permanent depot that continuously supplies the human PTM, e.g., human-glycosylated, transgene product.

[0832] Transgenes

[0833] Provided are recombinant vectors containing a transgene encoding a HuPTM mAb or HuPTM Fab (or other antigen binding fragment of the HuPTM mAb) that binds to VEGF, EPOR, Aβ or kallikrein, that can be administered to deliver the HuPTM mAb or antigen binding fragment in a patient. The transgene is a nucleic acid comprising the nucleotide sequences encoding an antigen binding fragment of an antibody that binds to VEGF, EPOR, Aft or kallikrein, such as sevacizumab, LKA-651, solanezumab, lecanemab, GSK933776, or lanadelumab, or variants thereof, as detailed herein. The transgene may also encode an anti-VEGF, anti-EPOR, anti-Aft anti-kallikrein antigen binding fragment that contains additional glycosylation sites (e.g., see Courtois et al.).

[0834] In certain embodiments, the anti-VEGF antigen-binding fragment transgene comprises the nucleotide sequences encoding the heavy and light chains of the Fab portion of sevacizumab (having amino acid sequences of SEQ ID NOs. 31 and 32, respectively, see Table 5 and FIG. 9A). The nucleotide sequences may be codon optimized for expression in human cells. Nucleotide sequences may, for example, comprise the nucleotide sequences of SEQ ID NO: 101 (encoding the sevacizumab heavy chain Fab portion) and SEQ ID NO: 102 (encoding the sevacizumab light chain Fab portion) as set forth in Table 6. The heavy and light chain sequences both have a signal or leader sequence at the N-terminus appropriate for expression and secretion in human cells, in particular, one or more cells forming the retina. The signal sequence may have the amino acid sequence of MYRMQLLLLIALSLALVTNS (SEQ ID NO: 146). Alternatively, the signal sequence may have an amino acid sequence selected from any one of the signal sequences set forth in Table 2 that correspond to the proteins secreted by one or more cells forming the retina. Alternatively, the signal sequence may be appropriate for expression in muscle or liver cells, such as those listed in Tables 3 and 4 infra.

[0835] In addition to the heavy and light chain variable domain and C_{H}1 and C_{L} domain sequences, the transgenes may comprise, at the C-terminus of the heavy chain C_{H}1 domain sequence, all or a portion of the hinge region. In specific embodiments, the anti-VEGF antigen binding domain has a heavy chain Fab domain of SEQ ID NO: 31 with additional hinge region sequence starting after the C-terminal valine (V), contains all or a portion of the amino acid sequence EPKSCDKTHTCPPCPAPELLGG (SEQ ID NO: 194), and specifically, EPKSCDKTHL (SEQ ID NO: 196), EPKSCDKTHT (SEQ ID NO: 197), EPKSCDKTHTCPPCPA (SEQ ID NO: 198), EPKSCDKTHLCPPCPA (SEQ ID NO: 199), EPKSCDKTHTCPPCPAPELLGGPSVFL (SEQ ID NO: 200), or EPKSCDKTHLCPPCPAPELLGGPSVFL (SEQ ID NO: 201) as set forth in FIG. 9A. These hinge regions may be encoded by nucleotide sequences at the 3′ end of SEQ ID NO: 101 by the hinge region encoding sequences set forth in Table 6 (SEQ ID NO: 101). In another embodiment, the transgenes comprise the amino acid sequences encoding the full length (or substantially full length) heavy and light chains of the antibody, comprising the Fc domain at the C terminus of the heavy chain, e.g., having an amino acid sequence of SEQ ID NO: 299 (Table 7) or an IgG1 Fc domain, such as SEQ ID No. 283 or as depicted in FIG. 23, or a mutant or variant thereof. The Fc domain may be engineered for altered binding to one or more Fc receptors and/or effector function as disclosed in Section 5.1.9, infra.

[0836] In certain embodiments, the anti-VEGF antigen-binding fragment transgene encodes an VEGF antigen-binding fragment comprising a light chain comprising an amino acid sequence that is at least 85%, 86%, 87%, 88%, 89%, 90%, 91%, 92%, 93%, 94%, 95%, 96%, 97%, 98% or 99% identical to the sequence set forth in SEQ ID NO: 32. In certain embodiments, the anti-VEGF antigen-binding fragment transgene encodes an VEGF antigen-binding fragment comprising a heavy chain comprising an amino acid sequence that is at least 85%, 86%, 87%, 88%, 89%, 90%, 91%, 92%, 93%, 94%, 95%, 96%, 97%, 98% or 99% identical to the sequence set forth in SEQ ID NO: 31. In certain embodiments, the anti-VEGF antigen-binding fragment transgene encodes an antigen-binding fragment comprising a light chain comprising an amino acid sequence that is at least 85%, 86%, 87%, 88%, 89%, 90%, 91%, 92%, 93%, 94%, 95%, 96%, 97%, 98% or 99% identical to the sequence set forth in SEQ ID NO: 32 and a heavy chain comprising an amino acid sequence that is at least 85%, 86%, 87%, 88%, 89%, 90%, 91%, 92%, 93%, 94%, 95%, 96%, 97%, 98% or 99% identical to the sequence set forth in SEQ ID NO: 31. In specific embodiments, the VEGF antigen binding fragment comprises a heavy chain comprising an amino acid sequence of SEQ ID NO: 31 with 1, 2, 3, 4, 5, 6, 7, 8, 9, 10, 11, 12, 13, 14, 15 or more amino acid substitutions, insertions or deletions, and the substitutions, insertions or deletions are made, e.g., in the framework regions (e.g., those regions outside of the CDRs, which CDRs are underlined in FIG. 9A) or are substitutions with an amino acid present at that position in the heavy chain of one or more of the other therapeutic antibodies, for example, as identified by the alignment in FIG. 20A. In specific embodiments, the VEGF antigen binding fragment comprises a light chain comprising an amino acid sequence of SEQ ID NO: 32 with 1, 2, 3, 4, 5, 6, 7, 8, 9, 10, 11, 12, 13, 14, 15 or more amino acid substitutions, insertions or deletions, and the substitutions, insertions or deletions are made, e.g., in the framework regions (e.g., those regions outside of the CDRs, which CDRs are underlined in FIG. 9A) or are substitutions with an amino acid present at that position in the light chain of one or more of the other therapeutic antibodies, for example, as identified by the alignment in FIG. 20B.

[0837] In certain embodiments, the anti-VEGF antigen-binding fragment transgene encodes a hyperglycosylated sevacizumab Fab, comprising a heavy chain and a light chain of SEQ ID NOs: 31 and 32, respectively, with one or more of the following mutations: L117N (heavy chain), Q165N or Q165S (light chain), and/or E200N (light chain) (see FIGS. 20A (heavy chain) and 20B (light chain)).

[0838] In certain embodiments, the anti-VEGF antigen-binding fragment transgene encodes an antigen-binding fragment and comprises the nucleotide sequences encoding the six sevacizumab CDRs which are underlined in the heavy and light chain variable domain sequences of FIG. 9A which are spaced between framework regions, generally human framework regions, and associated with constant domains depending upon the form of the antigen-binding molecule, as is known in the art to form the heavy and/or light chain variable domain of an anti-VEGF antibody or antigen-binding fragment thereof.

[0839] In certain embodiments, the anti-EPOR antigen-binding fragment transgene comprises the nucleotide sequences encoding the heavy and light chains of the Fab portion of LKA-651 (NVS2) (having amino acid sequences of SEQ ID NOs. 33 and 34, respectively, see Table 5 and FIG. 9B). The nucleotide sequences may be codon optimized for expression in human cells. Nucleotide sequences may, for example, comprise the nucleotide sequences of SEQ ID NO: 103 (encoding the LKA-651 (NVS2) heavy chain Fab portion) and SEQ ID NO: 104 (encoding the LKA-651 (NVS2) light chain Fab portion) as set forth in Table 6. The heavy and light chain sequences both have a signal or leader sequence at the N-terminus appropriate for expression and secretion in human cells, in particular, one or more cells forming the retina. The signal sequence may have the amino acid sequence of MYRMQLLLLIALSLALVTNS (SEQ ID NO: 146). Alternatively, the signal sequence may have an amino acid sequence selected from any one of the signal sequences set forth in Table 2 that correspond to the proteins secreted by one or more cells forming the retina. Alternatively, the signal sequence may be appropriate for expression in muscle or liver cells, such as those listed in Tables 3 and 4 infra.

[0840] In addition to the heavy and light chain variable domain and C_{H}1 and C_{L} domain sequences, the transgenes may comprise, at the C-terminus of the heavy chain C_{H}1 domain sequence, all or a portion of the hinge region. In specific embodiments, the anti-EPOR antigen binding domain has a heavy chain variable domain of SEQ ID NO: 33 with additional hinge region sequence starting after the C-terminal valine (V), contains all or a portion of the amino acid sequence EPKSCDKTHTCPPCPAPELLGG (SEQ ID NO: 194), and specifically, EPKSCDKTHL (SEQ ID NO: 196), EPKSCDKTHT (SEQ ID NO: 197), EPKSCDKTHTCPPCPA (SEQ ID NO: 198), EPKSCDKTHLCPPCPA (SEQ ID NO: 199), EPKSCDKTHTCPPCPAPELLGGPSVFL (SEQ ID NO: 200), or EPKSCDKTHLCPPCPAPELLGGPSVFL (SEQ ID NO: 201) as set forth in FIG. 9B. These hinge regions may be encoded by nucleotide sequences at the 3′ end of SEQ ID NO: 103 by the hinge region encoding sequences set forth in Table 6 (SEQ ID NO: 103). In another embodiment, the transgenes comprise the amino acid sequences encoding the full length (or substantially full length) heavy and light chains of the antibody, comprising the Fc domain at the C terminus of the heavy chain, e.g., an IgG1 Fc domain, such as SEQ ID No. 283 or as depicted in FIG. 23, or a mutant or variant thereof. The Fc domain may be engineered for altered binding to one or more Fc receptors and/or effector function as disclosed in Section 5.1.9, infra.

[0841] In certain embodiments, the anti-EPOR antigen-binding fragment transgene encodes an EPOR antigen-binding fragment comprising a light chain comprising an amino acid sequence that is at least 85%, 86%, 87%, 88%, 89%, 90%, 91%, 92%, 93%, 94%, 95%, 96%, 97%, 98% or 99% identical to the sequence set forth in SEQ ID NO: 34. In certain embodiments, the anti-EPOR antigen-binding fragment transgene encodes an EPOR antigen-binding fragment comprising a heavy chain comprising an amino acid sequence that is at least 85%, 86%, 87%, 88%, 89%, 90%, 91%, 92%, 93%, 94%, 95%, 96%, 97%, 98% or 99% identical to the sequence set forth in SEQ ID NO: 33. In certain embodiments, the anti-EPOR antigen-binding fragment transgene encodes an antigen-binding fragment comprising a light chain comprising an amino acid sequence that is at least 85%, 86%, 87%, 88%, 89%, 90%, 91%, 92%, 93%, 94%, 95%, 96%, 97%, 98% or 99% identical to the sequence set forth in SEQ ID NO: 34 and a heavy chain comprising an amino acid sequence that is at least 85%, 86%, 87%, 88%, 89%, 90%, 91%, 92%, 93%, 94%, 95%, 96%, 97%, 98% or 99% identical to the sequence set forth in SEQ ID NO: 33. In specific embodiments, the EPOR antigen binding fragment comprises a heavy chain comprising an amino acid sequence of SEQ ID NO: 33 with 1, 2, 3, 4, 5, 6, 7, 8, 9, 10, 11, 12, 13, 14, 15 or more amino acid substitutions, insertions or deletions, and the substitutions, insertions or deletions are made, e.g., in the framework regions (e.g., those regions outside of the CDRs, which CDRs are underlined in FIG. 9B) or are substitutions with an amino acid present at that position in the heavy chain of one or more of the other therapeutic antibodies, for example, as identified by the alignment in FIG. 20A. In specific embodiments, the EPOR antigen binding fragment comprises a light chain comprising an amino acid sequence of SEQ ID NO: 34 with 1, 2, 3, 4, 5, 6, 7, 8, 9, 10, 11, 12, 13, 14, 15 or more amino acid substitutions, insertions or deletions, and the substitutions, insertions or deletions are made, e.g., in the framework regions (e.g., those regions outside of the CDRs, which CDRs are underlined in FIG. 9B) or are substitutions with an amino acid present at that position in the light chain of one or more of the other therapeutic antibodies, for example, as identified by the alignment in FIG. 20B.

[0842] In certain embodiments, the anti-EPOR antigen-binding fragment transgene encodes a hyperglycosylated LKA-651 (NVS2) Fab, comprising a heavy chain and a light chain of SEQ ID NOs: 33 and 34, respectively, with one or more of the following mutations: L112N (heavy chain) and/or Q195N (light chain) (see FIGS. 20A (heavy chain) and 20B (light chain)).

[0843] In certain embodiments, the anti-EPOR antigen-binding fragment transgene encodes an antigen-binding fragment and comprises the nucleotide sequences encoding the six LKA-651 (NVS3) CDRs which are underlined in the heavy and light chain variable domain sequences of FIG. 9C which are spaced between framework regions, generally human framework regions, and associated with constant domains depending upon the form of the antigen-binding molecule, as is known in the art to form the heavy and/or light chain variable domain of an anti-EPOR antibody or antigen-binding fragment thereof.

[0844] In certain embodiments, the anti-EPOR antigen-binding fragment transgene comprises the nucleotide sequences encoding the heavy and light chains of the Fab portion of LKA-651 (NVS3) (having amino acid sequences of SEQ ID NOs. 35 and 36, respectively, see Table 5 and FIG. 9C). The nucleotide sequences may be codon optimized for expression in human cells. Nucleotide sequences may, for example, comprise the nucleotide sequences of SEQ ID NO: 105 (encoding the LKA-651 (NVS3) heavy chain Fab portion) and SEQ ID NO: 106 (encoding the LKA-651 (NVS3) light chain Fab portion) as set forth in Table 6. The heavy and light chain sequences both have a signal or leader sequence at the N-terminus appropriate for expression and secretion in human cells, in particular, one or more cells forming the retina. The signal sequence may have the amino acid sequence of MYRMQLLLLIALSLALVTNS (SEQ ID NO: 146). Alternatively, the signal sequence may have an amino acid sequence selected from any one of the signal sequences set forth in Table 2 that correspond to the proteins secreted by one or more cells forming the retina. Alternatively, the signal sequence may be appropriate for expression in muscle or liver cells, such as those listed in Tables 3 and 4 infra.

[0845] In addition to the heavy and light chain variable domain and C_{H}1 and C_{L} domain sequences, the transgenes may comprise, at the C-terminus of the heavy chain C_{H}1 domain sequence, all or a portion of the hinge region. In specific embodiments, the anti-EPOR antigen binding domain has a heavy chain Fab domain of SEQ ID NO: 35 with additional hinge region sequence starting after the C-terminal valine (V), contains all or a portion of the amino acid sequence EPKSCDKTHTCPPCPAPELLGG (SEQ ID NO: 194), and specifically, EPKSCDKTHL (SEQ ID NO: 196), EPKSCDKTHT (SEQ ID NO: 197), EPKSCDKTHTCPPCPA (SEQ ID NO: 198), EPKSCDKTHLCPPCPA (SEQ ID NO: 199), EPKSCDKTHTCPPCPAPELLGGPSVFL (SEQ ID NO: 200), or EPKSCDKTHLCPPCPAPELLGGPSVFL (SEQ ID NO: 201) as set forth in FIG. 9C. These hinge regions may be encoded by nucleotide sequences at the 3′ end of SEQ ID NO: 105 by the hinge region encoding sequences set forth in Table 6 (SEQ ID NO: 105). In another embodiment, the transgenes comprise the amino acid sequences encoding the full length (or substantially full length) heavy and light chains of the antibody, comprising the Fc domain at the C terminus of the heavy chain, e.g. an IgG1 Fc domain, such as SEQ ID No. 283 or as depicted in FIG. 23, or a mutant or variant thereof. The Fc domain may be engineered for altered binding to one or more Fc receptors and/or effector function as disclosed in Section 5.1.9, infra.

[0846] In certain embodiments, the anti-EPOR antigen-binding fragment transgene encodes an EPOR antigen-binding fragment comprising a light chain comprising an amino acid sequence that is at least 85%, 86%, 87%, 88%, 89%, 90%, 91%, 92%, 93%, 94%, 95%, 96%, 97%, 98% or 99% identical to the sequence set forth in SEQ ID NO: 36. In certain embodiments, the anti-EPOR antigen-binding fragment transgene encodes an EPOR antigen-binding fragment comprising a heavy chain comprising an amino acid sequence that is at least 85%, 86%, 87%, 88%, 89%, 90%, 91%, 92%, 93%, 94%, 95%, 96%, 97%, 98% or 99% identical to the sequence set forth in SEQ ID NO: 35. In certain embodiments, the anti-EPOR antigen-binding fragment transgene encodes an antigen-binding fragment comprising a light chain comprising an amino acid sequence that is at least 85%, 86%, 87%, 88%, 89%, 90%, 91%, 92%, 93%, 94%, 95%, 96%, 97%, 98% or 99% identical to the sequence set forth in SEQ ID NO: 36 and a heavy chain comprising an amino acid sequence that is at least 85%, 86%, 87%, 88%, 89%, 90%, 91%, 92%, 93%, 94%, 95%, 96%, 97%, 98% or 99% identical to the sequence set forth in SEQ ID NO: 35. In specific embodiments, the EPOR antigen binding fragment comprises a heavy chain comprising an amino acid sequence of SEQ ID NO: 35 with 1, 2, 3, 4, 5, 6, 7, 8, 9, 10, 11, 12, 13, 14, 15 or more amino acid substitutions, insertions or deletions, and the substitutions, insertions or deletions are made, e.g., in the framework regions (e.g., those regions outside of the CDRs, which CDRs are underlined in FIG. 9C) or are substitutions with an amino acid present at that position in the heavy chain of one or more of the other therapeutic antibodies, for example, as identified by the alignment in FIG. 20A. In specific embodiments, the EPOR antigen binding fragment comprises a light chain comprising an amino acid sequence of SEQ ID NO: 36 with 1, 2, 3, 4, 5, 6, 7, 8, 9, 10, 11, 12, 13, 14, 15 or more amino acid substitutions, insertions or deletions, and the substitutions, insertions or deletions are made, e.g., in the framework regions (e.g., those regions outside of the CDRs, which CDRs are underlined in FIG. 9C) or are substitutions with an amino acid present at that position in the light chain of one or more of the other therapeutic antibodies, for example, as identified by the alignment in FIG. 20B.

[0847] In certain embodiments, the anti-EPOR antigen-binding fragment transgene encodes a hyperglycosylated LKA-651 (NVS3) Fab, comprising a heavy chain and a light chain of SEQ ID NOs: 35 and 36, respectively, with one or more of the following mutations: L122N (heavy chain) and/or Q195N (light chain) (see FIGS. 20A (heavy chain) and 20B (light chain)).

[0848] In certain embodiments, the anti-EPOR antigen-binding fragment transgene encodes an antigen-binding fragment and comprises the nucleotide sequences encoding the six LKA-651 (NVS3) CDRs which are underlined in the heavy and light chain variable domain sequences of FIG. 9C which are spaced between framework regions, generally human framework regions, and associated with constant domains depending upon the form of the antigen-binding molecule, as is known in the art to form the heavy and/or light chain variable domain of an anti-EPOR antibody or antigen-binding fragment thereof.

[0849] In certain embodiments, the anti-An antigen-binding fragment transgene comprises the nucleotide sequences encoding the heavy and light chains of the Fab portion of solanezumab (having amino acid sequences of SEQ ID NOs. 1 and 2, respectively, see Table 5 and FIG. 2A). The nucleotide sequences may be codon optimized for expression in human cells. Nucleotide sequences may, for example, comprise the nucleotide sequences of SEQ ID NO: 71 (encoding the solanezumab heavy chain Fab portion) and SEQ ID NO: 72 (encoding the solanezumab light chain Fab portion) as set forth in Table 6. The heavy and light chain sequences both have a signal or leader sequence at the N-terminus appropriate for expression and secretion in human cells, in particular, one or more cells forming the retina. The signal sequence may have the amino acid sequence of MYRMQLLLLIALSLALVTNS (SEQ ID NO: 146). Alternatively, the signal sequence may have an amino acid sequence selected from any one of the signal sequences set forth in Table 2 that correspond to the proteins secreted by one or more cells forming the retina. Alternatively, the signal sequence may be appropriate for expression in muscle or liver cells, such as those listed in Tables 3 and 4 infra.

[0850] In addition to the Fab fragments, including the heavy and light chain variable domain sequences and C_{L} C_{H}1, the transgenes may comprise, at the C-terminus of the heavy chain C_{H}1 sequence, all or a portion of the hinge region. In specific embodiments, the anti-Aβ-antigen binding domain has a heavy chain variable domain and C_{H}1 domain of SEQ ID NO: 1 with additional hinge region sequence starting after the C-terminal valine (V), contains all or a portion of the amino acid sequence EPKSCDKTHTCPPCPAPELLGG (SEQ ID NO: 194), and specifically, EPKSCDKTHL (SEQ ID NO: 196), EPKSCDKTHT (SEQ ID NO: 197), EPKSCDKTHTCPPCPA (SEQ ID NO: 198), EPKSCDKTHLCPPCPA (SEQ ID NO: 199), EPKSCDKTHTCPPCPAPELLGGPSVFL (SEQ ID NO: 200) or EPKSCDKTHLCPPCPAPELLGGPSVFL (SEQ ID NO: 201) as set forth in FIG. 2A. These hinge regions may be encoded by nucleotide sequences at the 3′ end of SEQ ID NO: 71 by the hinge region encoding sequences set forth in Table 6 (SEQ ID NO: 71). In another embodiment, the transgenes comprise the amino acid sequences encoding the full length (or substantially full length) heavy and light chains of the antibody, comprising the Fc domain at the C terminus of the heavy chain, e.g. an IgG1 Fc domain, such as SEQ ID NO: 290 of Table 7, SEQ ID No. 283 or as depicted in FIG. 23, or a mutant or variant thereof. The Fc domain may be engineered for altered binding to one or more Fc receptors and/or effector function as disclosed in Section 5.1.9, infra.

[0851] In certain embodiments, the anti-Aβ antigen-binding fragment transgene encodes an Aβ antigen-binding fragment comprising a light chain comprising an amino acid sequence that is at least 85%, 86%, 87%, 88%, 89%, 90%, 91%, 92%, 93%, 94%, 95%, 96%, 97%, 98% or 99% identical to the sequence set forth in SEQ ID NO: 2. In certain embodiments, the anti-Aβ antigen-binding fragment transgene encodes an Aβ antigen-binding fragment comprising a heavy chain comprising an amino acid sequence that is at least 85%, 86%, 87%, 88%, 89%, 90%, 91%, 92%, 93%, 94%, 95%, 96%, 97%, 98% or 99% identical to the sequence set forth in SEQ ID NO: 1. In certain embodiments, the anti-Aβ antigen-binding fragment transgene encodes an antigen-binding fragment comprising a light chain comprising an amino acid sequence that is at least 85%, 86%, 87%, 88%, 89%, 90%, 91%, 92%, 93%, 94%, 95%, 96%, 97%, 98% or 99% identical to the sequence set forth in SEQ ID NO: 2 and a heavy chain comprising an amino acid sequence that is at least 85%, 86%, 87%, 88%, 89%, 90%, 91%, 92%, 93%, 94%, 95%, 96%, 97%, 98% or 99% identical to the sequence set forth in SEQ ID NO: 1. In specific embodiments, the Aβ antigen binding fragment comprises a heavy chain comprising an amino acid sequence of SEQ ID NO: 1 with 1, 2, 3, 4, 5, 6, 7, 8, 9, 10, 11, 12, 13, 14, 15 or more amino acid substitutions, insertions or deletions, and the substitutions, insertions or deletions are made for example, in the framework regions (e.g., those regions outside of the CDRs, which CDRs are underlined in FIG. 2A) or are substitutions with an amino acid present at that position in the heavy chain of one or more of the other therapeutic antibodies, for example, as identified by the alignment in FIG. 20A. In specific embodiments, the Aβ antigen binding fragment comprises a light chain comprising an amino acid sequence of SEQ ID NO: 2 with 1, 2, 3, 4, 5, 6, 7, 8, 9, 10, 11, 12, 13, 14, 15 or more amino acid substitutions, insertions or deletions, and the substitutions, insertions or deletions are made for example, in the framework regions (e.g., those regions outside of the CDRs, which CDRs are underlined in FIG. 2A) or are substitutions with an amino acid present at that position in the light chain of one or more of the other therapeutic antibodies, for example, as identified by the alignment in FIG. 20B.

[0852] In certain embodiments, the anti-Aβ antigen-binding fragment transgene encodes a hyperglycosylated solanezumab Fab, comprising a heavy chain and a light chain of SEQ ID NOs: 1 and 2, respectively, with one or more of the following mutations: L107N (heavy chain), Q165N or Q165S (light chain), and/or E200N (light chain) (see FIG. 20A (heavy chain) and B (light chain)).

[0853] In certain embodiments, the anti-An antigen-binding fragment transgene encodes an antigen-binding fragment and comprises the nucleotide sequences encoding the six solanezumab CDRs which are underlined in the heavy and light chain variable domain sequences of FIG. 2A which are spaced between framework regions, generally human framework regions, and associated with constant domains depending upon the form of the antigen-binding molecule, as is known in the art to form the heavy and/or light chain variable domain of an anti-An antibody or antigen-binding fragment thereof.

[0854] In certain embodiments, the anti-Aβ antigen-binding fragment transgene comprises the nucleotide sequences encoding the heavy and light chains of the Fab portion of GSK933776 (having amino acid sequences of SEQ ID NOs. 3 and 4, respectively, see Table 5 and FIG. 2B). The nucleotide sequences may be codon optimized for expression in human cells. Nucleotide sequences may, for example, comprise the nucleotide sequences of SEQ ID NO: 73 (encoding the GSK933776 heavy chain Fab portion) and SEQ ID NO: 74 (encoding the GSK933776 light chain Fab portion) as set forth in Table 6. The heavy and light chain sequences both have a signal or leader sequence at the N-terminus appropriate for expression and secretion in human cells, in particular, one or more cells forming the retina. The signal sequence may have the amino acid sequence of MYRMQLLLLIALSLALVTNS (SEQ ID NO: 146). Alternatively, the signal sequence may have an amino acid sequence selected from any one of the signal sequences set forth in Table 2 that correspond to the proteins secreted by one or more cells forming the retina. Alternatively, the signal sequence may be appropriate for expression in muscle or liver cells, such as those listed in Tables 3 and 4 infra.

[0855] In addition to the heavy and light chain variable domain and C_{H}1 and C_{L} domain sequences, the transgenes may comprise, at the C-terminus of the heavy chain C_{H}1 domain sequence, all or a portion of the hinge region. In specific embodiments, the anti-Aβ-antigen binding domain has a heavy chain Fab domain of SEQ ID NO: 3 with additional hinge region sequence starting after the C-terminal valine (V), contains all or a portion of the amino acid sequence EPKSCDKTHTCPPCPAPELAGA (SEQ ID NO: 202), and specifically, EPKSCDKTHL (SEQ ID NO: 196), EPKSCDKTHT (SEQ ID NO: 197), EPKSCDKTHTCPPCPA (SEQ ID NO: 198), EPKSCDKTHLCPPCPA (SEQ ID NO: 199), EPKSCDKTHTCPPCPAPELAGAPSVFL (SEQ ID NO: 204) or EPKSCDKTHLCPPCPAPELAGAPSVFL (SEQ ID NO: 205) as set forth in FIG. 2B. These hinge regions may be encoded by nucleotide sequences at the 3′ end of SEQ ID NO: 73 by the hinge region encoding sequences set forth in Table 6 (SEQ ID NO: 73). In another embodiment, the transgenes comprise the amino acid sequences encoding the full length (or substantially full length) heavy and light chains of the antibody, comprising the Fc domain at the C terminus of the heavy chain, e.g., having an amino acid sequence of SEQ ID NO: 291 (Table 7) or an IgG1 Fc domain, such as SEQ ID No. 283 or as depicted in FIG. 23, or a mutant or variant thereof. The Fc domain may be engineered for altered binding to one or more Fc receptors and/or effector function as disclosed in Section 5.1.9, infra.

[0856] In certain embodiments, the anti-Aβ antigen-binding fragment transgene encodes an Aβ antigen-binding fragment comprising a light chain comprising an amino acid sequence that is at least 85%, 86%, 87%, 88%, 89%, 90%, 91%, 92%, 93%, 94%, 95%, 96%, 97%, 98% or 99% identical to the sequence set forth in SEQ ID NO: 4. In certain embodiments, the anti-Aβ antigen-binding fragment transgene encodes an Aβ antigen-binding fragment comprising a heavy chain comprising an amino acid sequence that is at least 85%, 86%, 87%, 88%, 89%, 90%, 91%, 92%, 93%, 94%, 95%, 96%, 97%, 98% or 99% identical to the sequence set forth in SEQ ID NO: 3. In certain embodiments, the anti-Aβ antigen-binding fragment transgene encodes an antigen-binding fragment comprising a light chain comprising an amino acid sequence that is at least 85%, 86%, 87%, 88%, 89%, 90%, 91%, 92%, 93%, 94%, 95%, 96%, 97%, 98% or 99% identical to the sequence set forth in SEQ ID NO: 4 and a heavy chain comprising an amino acid sequence that is at least 85%, 86%, 87%, 88%, 89%, 90%, 91%, 92%, 93%, 94%, 95%, 96%, 97%, 98% or 99% identical to the sequence set forth in SEQ ID NO: 3. In specific embodiments, the Aβ antigen binding fragment comprises a heavy chain comprising an amino acid sequence of SEQ ID NO: 3 with 1, 2, 3, 4, 5, 6, 7, 8, 9, 10, 11, 12, 13, 14, 15 or more amino acid substitutions, insertions or deletions, and the substitutions, insertions or deletions are made, e.g., in the framework regions (e.g., those regions outside of the CDRs, which CDRs are underlined in FIG. 2B) or are substitutions with an amino acid present at that position in the heavy chain of one or more of the other therapeutic antibodies, for example, as identified by the alignment in FIG. 20A. In specific embodiments, the Aβ antigen binding fragment comprises a light chain comprising an amino acid sequence of SEQ ID NO: 4 with 1, 2, 3, 4, 5, 6, 7, 8, 9, 10, 11, 12, 13, 14, 15 or more amino acid substitutions, insertions or deletions, and the substitutions, insertions or deletions are made, e.g., in the framework regions (e.g., those regions outside of the CDRs, which CDRs are underlined in FIG. 2B) or are substitutions with an amino acid present at that position in the light chain of one or more of the other therapeutic antibodies, for example, as identified by the alignment in FIG. 20B.

[0857] In certain embodiments, the anti-Aβ antigen-binding fragment transgene encodes a hyperglycosylated GSK933776 Fab, comprising a heavy chain and a light chain of SEQ ID NOs: 3 and 4, respectively, with one or more of the following mutations: L110N (heavy chain), Q165N or Q165S (light chain), and/or E200N (light chain) (see FIGS. 20A (heavy chain) and 20B (light chain)).

[0858] In certain embodiments, the anti-Aβ antigen-binding fragment transgene encodes an antigen-binding fragment and comprises the nucleotide sequences encoding the six GSK933776 CDRs which are underlined in the heavy and light chain variable domain sequences of FIG. 2B which are spaced between framework regions, generally human framework regions, and associated with constant domains depending upon the form of the antigen-binding molecule, as is known in the art to form the heavy and/or light chain variable domain of an anti-Aβ antibody or antigen-binding fragment thereof.

[0859] The anti-kallikrein constructs and HuPTM mAbs and HuPTM Fabs are described in detail in Section 5.3.18, infra. Provided are transgenes for expression of the anti-kallikrein antibody lanadelumab, sequences of which are provided in Table 8.

[0860] Gene Therapy Methods

[0861] Provided are methods of treating human subjects for one or more retinal disorders (such as diabetic retinopathy, mCNV, macular degeneration, or macular edema) by administration of a viral vector containing a transgene encoding an anti-VEGF antibody or antigen binding fragment thereof. The antibody may be sevacizumab or a Fab fragment thereof or any antigen binding fragment thereof. In embodiments, the patient has been diagnosed with and/or has symptoms associated with one or more of the various retinal disorders listed above.

[0862] Also, provided are methods of treating human subjects for one or more retinal disorders (such as diabetic retinopathy, mCNV, macular degeneration, or macular edema) by administration of a viral vector containing a transgene encoding an anti-EPOR antibody or antigen binding fragment thereof. The antibody may be LKA-651, or a Fab fragment thereof, or other antigen-binding fragment thereof. In embodiments, the patient has been diagnosed with and/or has symptoms associated with one or more of the various retinal disorders listed above.

[0863] Further provided are methods of treating human subjects for dry AMD degeneration by administration of a viral vector containing a transgene encoding an anti-Aβ antibody or antigen binding fragment thereof. The antibody or Fab fragment thereof may be solanezumab, lecanemab, or GSK933776. In embodiments, the patient has been diagnosed with and/or has symptoms associated with dry AMD.

[0864] Provided are methods of treating human subjects for diabetic retinopathy or diabetic macular edema by administration of a viral vector containing a transgene encoding an anti-kallikrein antibody or antigen binding fragment thereof. The antibody may be lanadelumab, or a Fab fragment thereof, or other antigen-binding fragment thereof. In embodiments, the patient has been diagnosed with and/or has symptoms associated with one or more of the various retinal disorders listed above. In specific embodiments, the transgene is a lanadelumab coding transgene in Table 8.

[0865] Recombinant vector used for delivering the transgene are described in Section 5.4.3. Such vectors should have a tropism for human retina-type cells and can include non-replicating rAAV, particularly those bearing an AAV8 capsid. Alternatively, vectors bearing an AAV2.7m8 capsid can be used for ocular indications. The recombinant vectors, such as the ones shown in FIGS. 9A-C, 2A-C and 19, can be administered in any manner such that the recombinant vector enters the retina, e.g., by introducing the recombinant vector into the eye. See Section 5.5.3 for details regarding the methods of treatment.

[0866] Subjects to whom such gene therapy is administered can be those responsive to anti-VEGF, anti-EPOR, anti-Aβ or anti-kallikrein antibodies. In certain embodiments, the methods encompass treating patients who have been diagnosed with one or more retinal disorders, or have one or more symptoms associated therewith, and identified as responsive to treatment with an anti-VEGF, anti-EPOR, anti-Aβ or anti-kallikrein antibody or considered a good candidate for therapy with an anti-VEGF, anti-EPOR, anti-Aβ or anti-kallikrein antibody. In specific embodiments, the patients have previously been treated with sevacizumab, LKA-651, solanezumab, lecanemab, GSK933776 or lanadelumab and have been found to be responsive to sevacizumab, LKA-651, solanezumab, lecanemab, GSK933776 or lanadelumab. To determine responsiveness, the anti-VEGF, anti-EPOR, anti-Aβ or anti-kallikrein, or antigen-binding fragment transgene product (e.g., produced in cell culture, bioreactors, etc.) may be administered directly to the subject.

[0867] Human Post Translationally Modified Antibodies

[0868] The production of the anti-VEGF, anti-EPOR, anti-Aβ or anti-kallikrein HuPTM mAb or HuPTM Fab, should result in a “biobetter” molecule for the treatment of one or more retinal disorders accomplished via gene therapy—e.g., by administering a viral vector or other DNA expression construct encoding the anti-VEGF, anti-EPOR, anti-Aβ, anti-kallikrein HuPTM Fab, subretinally, intravitreally, or suprachoroidally to human subjects (patients) diagnosed with or having one or more symptoms of one or more retinal disorders, to create a permanent depot in the retina that continuously supplies the fully-human post-translationally modified, e.g., human-glycosylated, sulfated transgene product produced by transduced cells of the retina.

[0869] As an alternative, or an additional treatment to gene therapy, the anti-VEGF, anti-EPOR, anti-Aβ or anti-kallikrein HuPTM mAb or HuPTM Fab can be produced in human cell lines by recombinant DNA technology and administered to patients diagnosed with a retinal disorder for whom therapy for a retinal disorder is considered appropriate.

[0870] In specific embodiments, the anti-VEGF HuPTM mAb or antigen-binding fragment thereof has heavy and light chains with the amino acid sequences of the heavy and light chain Fab portions of sevacizumab as set forth in FIG. 9A (with glutamine (Q) glycosylation sites; asparaginal (N) glycosylation sites, non-consensus asparaginal (N) glycosylation sites; and tyrosine-O-sulfation sites (Y) are as indicated in the legend) has a glycosylation, particularly a 2,6-sialylation, at one or more of the amino acid positions N32 and/or N164 of the heavy chain (SEQ ID NO: 31) or N22, N163, and/or N215 of the light chain (SEQ ID NO: 32). Alternatively or in addition to, the HuPTM mAb or antigen binding-fragment thereof with the heavy and light chain variable domain sequences of sevacizumab has a sulfation group at Y95 of the heavy chain (SEQ ID NO: 31) and/or Y88 and/or Y89 of the light chain (SEQ ID NO: 32). In other embodiments, the anti-VEGF HuPTM mAb or antigen-binding fragment thereof does not contain detectable NeuGc moieties and/or does not contain detectable alpha-Gal moieties. In certain embodiments, the HuPTM mAb is a full length or substantially full length mAb with an Fc region.

[0871] In specific embodiments, the anti-EPOR HuPTM mAb or antigen-binding fragment thereof has heavy and light chains with the amino acid sequences of the heavy and light chain Fab portions of LKA-651 (NVS2) as set forth in FIG. 9B (with glutamine (Q) glycosylation sites; asparaginal (N) glycosylation sites, non-consensus asparaginal (N) glycosylation sites; and tyrosine-O-sulfation sites (Y) are as indicated in the legend) has a glycosylation, particularly a 2,6-sialylation, at one or more of the amino acid positions Q109 and/or N159 of the heavy chain (SEQ ID NO: 33) or N68 and/or N171 of the light chain (SEQ ID NO: 34). Alternatively or in addition to, the HuPTM mAb or antigen binding-fragment thereof with the heavy and light chain variable domain sequences of LKA-651 (NVS2) has a sulfation group at Y94 and/or Y95 of the heavy chain (SEQ ID NO: 33) and/or Y85, Y86, and/or Y96 of the light chain (SEQ ID NO: 34). In other embodiments, the anti-EPOR HuPTM mAb or antigen-binding fragment thereof does not contain detectable NeuGc moieties and/or does not contain detectable alpha-Gal moieties. In certain embodiments, the HuPTM mAb is a full length or substantially full length mAb with an Fc region.

[0872] In specific embodiments, the anti-EPOR HuPTM mAb or antigen-binding fragment thereof has heavy and light chains with the amino acid sequences of the heavy and light chain Fab portions of LK-651 (NVS3) as set forth in FIG. 9C (with glutamine (Q) glycosylation sites; asparaginal (N) glycosylation sites, non-consensus asparaginal (N) glycosylation sites; and tyrosine-O-sulfation sites (Y) are as indicated in the legend) has a glycosylation, particularly a 2,6-sialylation, at one or more of the amino acid positions N32, N80, and/or N169 of the heavy chain (SEQ ID NO: 35) or N68 and/or N171 of the light chain (SEQ ID NO: 36). Alternatively or in addition to, the HuPTM mAb or antigen binding-fragment thereof with the heavy and light chain variable domain sequences of LKA-651 (NVS3) has a sulfation group at Y97 and/or Y98 of the heavy chain (SEQ ID NO: 35) and/or Y30, Y31, Y85 and/or Y86 of the light chain (SEQ ID NO: 36). In other embodiments, the anti-EPOR HuPTM mAb or antigen-binding fragment thereof does not contain detectable NeuGc moieties and/or does not contain detectable alpha-Gal moieties. In certain embodiments, the HuPTM mAb is a full length or substantially full length mAb with an Fc region.

[0873] In specific embodiments, the anti-Aβ HuPTM mAb or antigen-binding fragment thereof has heavy and light chains with the amino acid sequences of the heavy and light chain Fab portions of solanezumab as set forth in FIG. 2A (with glutamine (Q) glycosylation sites; asparaginal (N) glycosylation sites, non-consensus asparaginal (N) glycosylation sites; and tyrosine-O-sulfation sites (Y) are as indicated in the legend) has glycosylation, particularly a 2,6-sialylation, at one or more of the amino acid positions N56, Q104, and/or N154 of the heavy chain (SEQ ID NO:1) or Q105, N163 and/or N215 of the light chain (SEQ ID NO: 2). Alternatively, or in addition to, the HuPTM mAb or antigen binding-fragment thereof with the heavy and light chain variable domain sequences of solanezumab has a sulfation group at Y94, Y95 and/or Y101 of the heavy chain (SEQ ID NO: 1) or Y91 and/or Y92 of the light chain (SEQ ID NO: 2). In other embodiments, the anti-Aβ HuPTM mAb or antigen-binding fragment thereof does not contain any detectable (e.g., as detected by assays known in the art, for example, those described in section 5.2, infra) NeuGc moieties and/or does not contain any detectable (e.g., as detected by assays known in the art, for example, those described in section 5.2, infra) alpha-Gal moieties. In certain embodiments, the anti-Aβ-HuPTM mAb is a full length mAb with an Fc region, e.g., the Fc domain of SEQ ID NO: 283, SEQ ID NO: 284 or SEQ ID NO: 285, or a mutant or variant thereof.

[0874] In specific embodiments, the anti-Aβ HuPTM mAb or antigen-binding fragment thereof has heavy and light chains with the amino acid sequences of the heavy and light chain Fab portions of GSK933776 as set forth in FIG. 2B (with glutamine (Q) glycosylation sites; asparaginal (N) glycosylation sites, non-consensus asparaginal (N) glycosylation sites; and tyrosine-O-sulfation sites (Y) are as indicated in the legend) has glycosylation, particularly a 2,6-sialylation, at one or more of the amino acid positions N32, Q107, and/or N157 of the heavy chain (SEQ ID NO: 3) or N163 and/or N215 of the light chain (SEQ ID NO: 4). Alternatively or in addition to, the HuPTM mAb or antigen binding-fragment thereof with the heavy and light chain variable domain sequences of GSK933776 has a sulfation group at Y94 and/or Y95 of the heavy chain (SEQ ID NO: 3) or Y91 and/or Y92 of the light chain (SEQ ID NO: 4). In other embodiments, the anti-Aβ HuPTM mAb or antigen-binding fragment thereof does not contain any detectable NeuGc moieties and/or does not contain any detectable alpha-Gal moieties. In certain embodiments, the HuPTM mAb is a full length or substantially full length mAb with an Fc region.

[0875] In certain embodiments, the HuPTM mAb or Fab is therapeutically effective and is at least 0.5%, 1% or 2% glycosylated and/or sulfated and may be at least 5%, 10% or even 50% or 100% glycosylated and/or sulfated. The goal of gene therapy treatment provided herein is to slow or arrest the progression of a retinal disorder, and/or to suppress angiogenesis. In the case of retinal disorders, efficacy may be monitored by monitoring vision acuity. For example, efficacy can be monitored by assessing change in vision acuity from baseline. (see, e.g., U.S. Department of Health and Human Services Food and Drug Administration Center for Drug Evaluation and Research, Center for Biologics Evaluation and Research. Guidance for industry: clinical trial endpoints for the approval of cancer drugs and biologics. https://www.fda.gov/downloads/Drugs/Guidances/ucm071590.pdf. Published May 2007. Accessed Oct. 13, 2017; Oncology Endpoints in a Changing Landscape. Manag. Care. 2016; 1(suppl):1-12).

[0876] Combinations of delivery of the anti-VEGF, anti-EPOR, or anti-Aβ HuPTM mAb or antigen-binding fragment thereof to the retina accompanied by delivery of other available treatments are encompassed by the methods provided herein. The additional treatments may be administered before, concurrently, or subsequent to the gene therapy treatment. Available treatments for diabetic retinopathy, mCNV, macular degeneration, or macular edema that could be combined with the gene therapy provided herein include but are not limited to laser photocoagulation, photodynamic therapy with verteporfin, aflibercept, and/or intravitreal steroids and administration with anti-VEGF, anti-EPOR, anti-Aβ agents, including but not limited to sevacizumab, LKA-651 (NVS2), LKA-651 (NVS3), solanezumab, lecanemab, or GSK933776.

### 5.3.9. Anti-ALK1, Anti-C5, and Anti-Endoglin HuPTM Constructs and Formulations for Ocular Disorders

[0877] Compositions and methods are described for the delivery of HuPTM mAb and antigen-binding fragments thereof, such as HuPTM Fabs, that bind to activin receptor like kinase 1 (ALK1), complement component 5 (C5), or anti-endoglin (ENG), respectively, indicated for treating one or more ocular disorders including retinal diseases caused by increased neovascularization, for example, nAMD (also known as “wet” AMD), dry AMD, retinal vein occlusion (RVO), diabetic macular edema (DME), diabetic retinopathy (DR), or non-infectious uveitis In certain embodiments, the HuPTM mAb has the amino acid sequence of ascrinvacumab, tesidolumab, ravulizumab, carotuximab, or an antigen binding fragment of one of the foregoing. The amino acid sequences of Fab fragments of ascrinvacumab, tesidolumab, ravulizumab, and carotuximab are provided in FIGS. 10A-D, respectively. Delivery may be accomplished via gene therapy—e.g., by administering a viral vector or other DNA expression construct encoding a ALK1-binding, C5-binding, or ENG-binding HuPTM mAb (or an antigen binding fragment and/or a hyperglycosylated derivative or other derivative, thereof, including an scFv) to patients (human subjects) diagnosed with, or having one or more symptoms of a ocular disorder (e.g. macular degeneration or macular uveitis) to create a permanent depot that continuously supplies the human PTM, e.g., human-glycosylated, transgene product.

[0878] Transgenes

[0879] Provided are recombinant vectors containing a transgene encoding a HuPTM mAb or HuPTM Fab (or other antigen binding fragment of the HuPTM mAb) that binds to ALK1, C5, or ENG that can be administered to deliver the HuPTM mAb or antigen binding fragment in a patient. The transgene is a nucleic acid comprising the nucleotide sequences encoding an antigen binding fragment of an antibody that binds to ALK1, C5, or ENG, such as ascrinvacumab, tesidolumab, ravulizumab, carotuximab, or variants thereof as detailed herein. The transgene may also encode an anti-ALK1, anti-C5, or anti-ENG antigen binding fragment that contains additional glycosylation sites (e.g., see Courtois et al.).

[0880] In certain embodiments, the anti-ALK1 antigen-binding fragment transgene comprises the nucleotide sequences encoding the heavy and light chains of the Fab portion of ascrinvacumab (having amino acid sequences of SEQ ID NOs. 37 and 38, respectively, see Table 5 and FIG. 10A). The nucleotide sequences may be codon optimized for expression in human cells. Nucleotide sequences may, for example, comprise the nucleotide sequences of SEQ ID NO: 107 (encoding the ascrinvacumab heavy chain Fab portion) and SEQ ID NO: 108 (encoding the ascrinvacumab light chain Fab portion) as set forth in Table 6. The heavy and light chain sequences both have a signal or leader sequence at the N-terminus appropriate for expression and secretion in human cells, in particular, one or more cells forming the retina. The signal sequence may have the amino acid sequence of MYRMQLLLLIALSLALVTNS (SEQ ID NO: 146). Alternatively, the signal sequence may have an amino acid sequence selected from any one of the signal sequences set forth in Table 2 that correspond to the proteins secreted by one or more cells forming the retina. Alternatively, the signal sequence may be appropriate for expression in muscle or liver cells, such as those listed in Tables 3 and 4 infra.

[0881] In addition to the heavy and light chain variable domain and C_{H}1 and C_{L} domain sequences, the transgenes may comprise, at the C-terminus of the heavy chain C_{H}1 domain sequence, all or a portion of the hinge region. In specific embodiments, the anti-ALK1 antigen binding domain has a heavy chain Fab domain of SEQ ID NO: 37 with additional hinge region sequence starting after the C-terminal valine (V), contains all or a portion of the amino acid sequence contains all or a portion of the amino acid sequence ERKCCVECPPCPAPPVAG (SEQ ID NO: 220) or ERKCCVECPPCPA (SEQ ID NO: 221) as set forth in FIG. 10A. These hinge regions may be encoded by nucleotide sequences at the 3′ end of SEQ ID NO: 107 by the hinge region encoding sequences set forth in Table 6 (SEQ ID NO: 107). In another embodiment, the transgenes comprise the amino acid sequences encoding the full length (or substantially full length) heavy and light chains of the antibody, comprising the Fc domain at the C terminus of the heavy chain, e.g., having an amino acid sequence of SEQ ID NO; 300 (Table 7) or an IgG2 Fc domain, such as SEQ ID No. 284 or as depicted in FIG. 23, or a mutant or variant thereof. The Fc domain may be engineered for altered binding to one or more Fc receptors and/or effector function as disclosed in Section 5.1.9, infra.

[0882] In certain embodiments, the anti-ALK1 antigen-binding fragment transgene encodes an ALK1 antigen-binding fragment comprising a light chain comprising an amino acid sequence that is at least 85%, 86%, 87%, 88%, 89%, 90%, 91%, 92%, 93%, 94%, 95%, 96%, 97%, 98% or 99% identical to the sequence set forth in SEQ ID NO: 38. In certain embodiments, the anti-ALK1 antigen-binding fragment transgene encodes an ALK1 antigen-binding fragment comprising a heavy chain comprising an amino acid sequence that is at least 85%, 86%, 87%, 88%, 89%, 90%, 91%, 92%, 93%, 94%, 95%, 96%, 97%, 98% or 99% identical to the sequence set forth in SEQ ID NO: 37. In certain embodiments, the anti-ALK1 antigen-binding fragment transgene encodes an antigen-binding fragment comprising a light chain comprising an amino acid sequence that is at least 85%, 86%, 87%, 88%, 89%, 90%, 91%, 92%, 93%, 94%, 95%, 96%, 97%, 98% or 99% identical to the sequence set forth in SEQ ID NO: 38 and a heavy chain comprising an amino acid sequence that is at least 85%, 86%, 87%, 88%, 89%, 90%, 91%, 92%, 93%, 94%, 95%, 96%, 97%, 98% or 99% identical to the sequence set forth in SEQ ID NO: 37. In specific embodiments, the ALK1 antigen binding fragment comprises a heavy chain comprising an amino acid sequence of SEQ ID NO: 37 with 1, 2, 3, 4, 5, 6, 7, 8, 9, 10, 11, 12, 13, 14, 15 or more amino acid substitutions, insertions or deletions, and the substitutions, insertions or deletions are made, e.g., in the framework regions (e.g., those regions outside of the CDRs, which CDRs are underlined in FIG. 10A) or are substitutions with an amino acid present at that position in the heavy chain of one or more of the other therapeutic antibodies, for example, as identified by the alignment in FIG. 20A. In specific embodiments, the ALK1 antigen binding fragment comprises a light chain comprising an amino acid sequence of SEQ ID NO: 38 with 1, 2, 3, 4, 5, 6, 7, 8, 9, 10, 11, 12, 13, 14, 15 or more amino acid substitutions, insertions or deletions, and the substitutions, insertions or deletions are made, e.g., in the framework regions (e.g., those regions outside of the CDRs, which CDRs are underlined in FIG. 10A) or are substitutions with an amino acid present at that position in the light chain of one or more of the other therapeutic antibodies, for example, as identified by the alignment in FIG. 20B.

[0883] In certain embodiments, the anti-ALK1 antigen-binding fragment transgene encodes a hyperglycosylated ascrinvacumab Fab, comprising a heavy chain and a light chain of SEQ ID NOs: 37 and 38, respectively, with one or more of the following mutations: L113N (heavy chain), Q161N or Q161S (light chain), and/or E196N (light chain) (see FIGS. 20A (heavy chain) and 20B (light chain)).

[0884] In certain embodiments, the anti-ALK1 antigen-binding fragment transgene encodes an antigen-binding fragment and comprises the nucleotide sequences encoding the six ascrinvacumab CDRs which are underlined in the heavy and light chain variable domain sequences of FIG. 10A which are spaced between framework regions, generally human framework regions, and associated with constant domains depending upon the form of the antigen-binding molecule, as is known in the art to form the heavy and/or light chain variable domain of an anti-ALK1 antibody or antigen-binding fragment thereof.

[0885] In certain embodiments, the anti-C5 antigen-binding fragment transgene comprises the nucleotide sequences encoding the heavy and light chains of the Fab portion of tesidolumab (having amino acid sequences of SEQ ID NOs. 39 and 40, respectively, see Table 5 and FIG. 10B). The nucleotide sequences may be codon optimized for expression in human cells. Nucleotide sequences may, for example, comprise the nucleotide sequences of SEQ ID NO: 109 (encoding the tesidolumab heavy chain Fab portion) and SEQ ID NO: 110 (encoding the tesidolumab light chain Fab portion) as set forth in Table 6. The heavy and light chain sequences both have a signal or leader sequence at the N-terminus appropriate for expression and secretion in human cells, in particular, one or more cells forming the retina. The signal sequence may have the amino acid sequence of MYRMQLLLLIALSLALVTNS (SEQ ID NO: 146). Alternatively, the signal sequence may have an amino acid sequence selected from any one of the signal sequences set forth in Table 2 that correspond to the proteins secreted by one or more cells forming the retina. Alternatively, the signal sequence may be appropriate for expression in muscle or liver cells, such as those listed in Tables 3 and 4 infra.

[0886] In addition to the heavy and light chain variable domain and C_{H}1 and C_{L} domain sequences, the transgenes may comprise, at the C-terminus of the heavy chain C_{H}1 domain sequence, all or a portion of the hinge region. In specific embodiments, the anti-C5 antigen binding domain has a heavy chain Fab domain of SEQ ID NO: 39 with additional hinge region sequence starting after the C-terminal valine (V), contains all or a portion of the amino acid sequence EPKSCDKTHTCPPCPAPEAAGG (SEQ ID NO: 210), and specifically, EPKSCDKTHL (SEQ ID NO: 196), EPKSCDKTHT (SEQ ID NO: 197), EPKSCDKTHTCPPCPA (SEQ ID NO: 198), EPKSCDKTHLCPPCPA (SEQ ID NO: 199), EPKSCDKTHTCPPCPAPEAAGGPSVFL (SEQ ID NO: 212), or EPKSCDKTHLCPPCPAPEAAGGPSVFL (SEQ ID NO: 213) as set forth in FIG. 10B. These hinge regions may be encoded by nucleotide sequences at the 3′ end of SEQ ID NO: 109 by the hinge region encoding sequences set forth in Table 6 (SEQ ID NO: 109). In another embodiment, the transgenes comprise the amino acid sequences encoding the full length (or substantially full length) heavy and light chains of the antibody, comprising the Fc domain at the C terminus of the heavy chain, e.g., having an amino acid sequence of SEQ ID NO: 301 (Table 7) or an IgG1 Fc domain, such as SEQ ID No. 283 or as depicted in FIG. 23, or a mutant or variant thereof. The Fc domain may be engineered for altered binding to one or more Fc receptors and/or effector function as disclosed in Section 5.1.9, infra.

[0887] In certain embodiments, the anti-C5 antigen-binding fragment transgene encodes an C5 antigen-binding fragment comprising a light chain comprising an amino acid sequence that is at least 85%, 86%, 87%, 88%, 89%, 90%, 91%, 92%, 93%, 94%, 95%, 96%, 97%, 98% or 99% identical to the sequence set forth in SEQ ID NO: 40. In certain embodiments, the anti-C5 antigen-binding fragment transgene encodes an C5 antigen-binding fragment comprising a heavy chain comprising an amino acid sequence that is at least 85%, 86%, 87%, 88%, 89%, 90%, 91%, 92%, 93%, 94%, 95%, 96%, 97%, 98% or 99% identical to the sequence set forth in SEQ ID NO: 39. In certain embodiments, the anti-C5 antigen-binding fragment transgene encodes an antigen-binding fragment comprising a light chain comprising an amino acid sequence that is at least 85%, 86%, 87%, 88%, 89%, 90%, 91%, 92%, 93%, 94%, 95%, 96%, 97%, 98% or 99% identical to the sequence set forth in SEQ ID NO: 40 and a heavy chain comprising an amino acid sequence that is at least 85%, 86%, 87%, 88%, 89%, 90%, 91%, 92%, 93%, 94%, 95%, 96%, 97%, 98% or 99% identical to the sequence set forth in SEQ ID NO: 39. In specific embodiments, the C5 antigen binding fragment comprises a heavy chain comprising an amino acid sequence of SEQ ID NO: 39 with 1, 2, 3, 4, 5, 6, 7, 8, 9, 10, 11, 12, 13, 14, 15 or more amino acid substitutions, insertions or deletions, and the substitutions, insertions or deletions are made, e.g., in the framework regions (e.g., those regions outside of the CDRs, which CDRs are underlined in FIG. 10B) or are substitutions with an amino acid present at that position in the heavy chain of one or more of the other therapeutic antibodies, for example, as identified by the alignment in FIG. 20A. In specific embodiments, the C5 antigen binding fragment comprises a light chain comprising an amino acid sequence of SEQ ID NO: 40 with 1, 2, 3, 4, 5, 6, 7, 8, 9, 10, 11, 12, 13, 14, 15 or more amino acid substitutions, insertions or deletions, and the substitutions, insertions or deletions are made, e.g., in the framework regions (e.g., those regions outside of the CDRs, which CDRs are underlined in FIG. 10B) or are substitutions with an amino acid present at that position in the light chain of one or more of the other therapeutic antibodies, for example, as identified by the alignment in FIG. 20B.

[0888] In certain embodiments, the anti-C5 antigen-binding fragment transgene encodes a hyperglycosylated tesidolumab Fab, comprising a heavy chain and a light chain of SEQ ID NOs: 39 and 40, respectively, with one or more of the following mutations: L111N (heavy chain) and/or Q196N (light chain) (see FIGS. 20A (heavy chain) and 20B (light chain)).

[0889] In certain embodiments, the anti-C5 antigen-binding fragment transgene encodes an antigen-binding fragment and comprises the nucleotide sequences encoding the six tesidolumab CDRs which are underlined in the heavy and light chain variable domain sequences of FIG. 10B which are spaced between framework regions, generally human framework regions, and associated with constant domains depending upon the form of the antigen-binding molecule, as is known in the art to form the heavy and/or light chain variable domain of an anti-C5 antibody or antigen-binding fragment thereof.

[0890] In certain embodiments, the anti-ENG antigen-binding fragment transgene comprises the nucleotide sequences encoding the heavy and light chains of the Fab portion of carotuximab (having amino acid sequences of SEQ ID NOs. 41 and 42, respectively, see Table 5 and FIG. 10C). The nucleotide sequences may be codon optimized for expression in human cells. Nucleotide sequences may, for example, comprise the nucleotide sequences of SEQ ID NO: 111 (encoding the carotuximab heavy chain Fab portion) and SEQ ID NO: 112 (encoding the carotuximab light chain Fab portion) as set forth in Table 6. The heavy and light chain sequences both have a signal or leader sequence at the N-terminus appropriate for expression and secretion in human cells, in particular, one or more cells forming the retina. The signal sequence may have the amino acid sequence of MYRMQLLLLIALSLALVTNS (SEQ ID NO: 146). Alternatively, the signal sequence may have an amino acid sequence selected from any one of the signal sequences set forth in Table 2 that correspond to the proteins secreted by one or more cells forming the retina. Alternatively, the signal sequence may be appropriate for expression in muscle or liver cells, such as those listed in Tables 3 and 4 infra.

[0891] In addition to the heavy and light chain variable domain and C_{H}1 and C_{L} domain sequences, the transgenes may comprise, at the C-terminus of the heavy chain C_{H}1 domain sequence, all or a portion of the hinge region. In specific embodiments, the anti-ENG antigen binding domain has a heavy chain Fab domain of SEQ ID NO: 41 with additional hinge region sequence starting after the C-terminal valine (V), contains all or a portion of the amino acid sequence EPKSCDKTHTCPPCPAPELLGG (SEQ ID NO: 194), and specifically, EPKSCDKTHL (SEQ ID NO: 196), EPKSCDKTHT (SEQ ID NO: 197), EPKSCDKTHTCPPCPA (SEQ ID NO: 198), EPKSCDKTHLCPPCPA (SEQ ID NO: 199), EPKSCDKTHTCPPCPAPELLGGPSVFL (SEQ ID NO: 200), or EPKSCDKTHLCPPCPAPELLGGPSVFL (SEQ ID NO: 201) as set forth in FIG. 10C. These hinge regions may be encoded by nucleotide sequences at the 3′ end of SEQ ID NO: 111 by the hinge region encoding sequences set forth in Table 6 (SEQ ID NO: 111). In another embodiment, the transgenes comprise the amino acid sequences encoding the full length (or substantially full length) heavy and light chains of the antibody, comprising the Fc domain at the C terminus of the heavy chain, e.g., having an amino acid sequence of SEQ ID NO: 302 (Table 7) or an IgG1 Fc domain, such as SEQ ID No. 283 or as depicted in FIG. 23, or a mutant or variant thereof. The Fc domain may be engineered for altered binding to one or more Fc receptors and/or effector function as disclosed in Section 5.1.9, infra.

[0892] In certain embodiments, the anti-ENG antigen-binding fragment transgene encodes an ENG antigen-binding fragment comprising a light chain comprising an amino acid sequence that is at least 85%, 86%, 87%, 88%, 89%, 90%, 91%, 92%, 93%, 94%, 95%, 96%, 97%, 98% or 99% identical to the sequence set forth in SEQ ID NO: 42. In certain embodiments, the anti-ENG antigen-binding fragment transgene encodes an ENG antigen-binding fragment comprising a heavy chain comprising an amino acid sequence that is at least 85%, 86%, 87%, 88%, 89%, 90%, 91%, 92%, 93%, 94%, 95%, 96%, 97%, 98% or 99% identical to the sequence set forth in SEQ ID NO: 41. In certain embodiments, the anti-ENG antigen-binding fragment transgene encodes an antigen-binding fragment comprising a light chain comprising an amino acid sequence that is at least 85%, 86%, 87%, 88%, 89%, 90%, 91%, 92%, 93%, 94%, 95%, 96%, 97%, 98% or 99% identical to the sequence set forth in SEQ ID NO: 42 and a heavy chain comprising an amino acid sequence that is at least 85%, 86%, 87%, 88%, 89%, 90%, 91%, 92%, 93%, 94%, 95%, 96%, 97%, 98% or 99% identical to the sequence set forth in SEQ ID NO: 41. In specific embodiments, the ENG antigen binding fragment comprises a heavy chain comprising an amino acid sequence of SEQ ID NO: 41 with 1, 2, 3, 4, 5, 6, 7, 8, 9, 10, 11, 12, 13, 14, 15 or more amino acid substitutions, insertions or deletions, and the substitutions, insertions or deletions, e.g., are made in the framework regions (e.g., those regions outside of the CDRs, which CDRs are underlined in FIG. 10C) or are substitutions with an amino acid present at that position in the heavy chain of one or more of the other therapeutic antibodies, for example, as identified by the alignment in FIG. 20A. In specific embodiments, the ENG antigen binding fragment comprises a light chain comprising an amino acid sequence of SEQ ID NO: 42 with 1, 2, 3, 4, 5, 6, 7, 8, 9, 10, 11, 12, 13, 14, 15 or more amino acid substitutions, insertions or deletions, and the substitutions, insertions or deletions are made, e.g., in the framework regions (e.g., those regions outside of the CDRs, which CDRs are underlined in FIG. 10C) or are substitutions with an amino acid present at that position in the light chain of one or more of the other therapeutic antibodies, for example, as identified by the alignment in FIG. 20B.

[0893] In certain embodiments, the anti-ENG antigen-binding fragment transgene encodes a hyperglycosylated carotuximab Fab, comprising a heavy chain and a light chain of SEQ ID NOs: 41 and 42, respectively, with one or more of the following mutations: T113N (heavy chain), Q159N or Q159S (light chain), and/or E194N (light chain) (see FIGS. 20A (heavy chain) and 20B (light chain)).

[0894] In certain embodiments, the anti-ENG antigen-binding fragment transgene encodes an antigen-binding fragment and comprises the nucleotide sequences encoding the six carotuximab CDRs which are underlined in the heavy and light chain variable domain sequences of FIG. 10C which are spaced between framework regions, generally human framework regions, and associated with constant domains depending upon the form of the antigen-binding molecule, as is known in the art to form the heavy and/or light chain variable domain of an anti-ENG antibody or antigen-binding fragment thereof.

[0895] In certain embodiments, the anti-C5 antigen-binding fragment transgene comprises the nucleotide sequences encoding the heavy and light chains of the Fab portion of ravulizumab (having amino acid sequences of SEQ ID NOs. 362 and 363, respectively, see Table 5 and FIG. 10D). The nucleotide sequences may be codon optimized for expression in human cells. Nucleotide sequences may, for example, comprise the nucleotide sequences of SEQ ID NO: 378 (encoding the ravulizumab heavy chain Fab portion) and SEQ ID NO: 379 (encoding the ravulizumab light chain Fab portion) as set forth in Table 6. The heavy and light chain sequences both have a signal or leader sequence at the N-terminus appropriate for expression and secretion in human cells, in particular, human CNS cells. The signal sequence may have the amino acid sequence of MYRMQLLLLIALSLALVTNS (SEQ ID NO: 146) or the one of the sequences found in Table 2 supra.

[0896] In addition to the Fab fragments, including the heavy and light chain variable domain sequences and C_{L} C_{H}1, the transgenes may comprise, at the C-terminus of the heavy chain C_{H}1 sequence, all or a portion of the hinge region. In specific embodiments, the anti-C5-antigen binding domain has a heavy chain variable domain and C_{H}1 domain of SEQ ID NO: 362 with additional hinge region sequence starting after the C-terminal valine (V), contains all or a portion of the amino acid sequence ERKCCVECPPCPAPPVAG (SEQ ID NO: 220) or ERKCCVECPPCPA (SEQ ID NO: 221) as set forth in FIG. 10D. These hinge regions may be encoded by nucleotide sequences at the 3′ end of SEQ ID NO: 378 by the hinge region encoding sequences set forth in Table 6 (SEQ ID NO: 378). In another embodiment, the transgenes comprise the amino acid sequences encoding the full length (or substantially full length) heavy and light chains of the antibody, comprising the Fc domain at the C terminus of the heavy chain, e.g. an IgG2 Fc domain, such as SEQ ID NO: 393 of Table 7, SEQ ID No. 284 or as depicted in FIG. 23, or a mutant or variant thereof. The Fc domain may be engineered for altered binding to one or more Fc receptors and/or effector function as disclosed in Section 5.1.9, infra.

[0897] In certain embodiments, the anti-C5 antigen-binding fragment transgene encodes an C5 antigen-binding fragment comprising a light chain comprising an amino acid sequence that is at least 85%, 86%, 87%, 88%, 89%, 90%, 91%, 92%, 93%, 94%, 95%, 96%, 97%, 98% or 99% identical to the sequence set forth in SEQ ID NO: 363. In certain embodiments, the anti-C5 antigen-binding fragment transgene encodes an C5 antigen-binding fragment comprising a heavy chain comprising an amino acid sequence that is at least 85%, 86%, 87%, 88%, 89%, 90%, 91%, 92%, 93%, 94%, 95%, 96%, 97%, 98% or 99% identical to the sequence set forth in SEQ ID NO: 362. In certain embodiments, the anti-C5 antigen-binding fragment transgene encodes an antigen-binding fragment comprising a light chain comprising an amino acid sequence that is at least 85%, 86%, 87%, 88%, 89%, 90%, 91%, 92%, 93%, 94%, 95%, 96%, 97%, 98% or 99% identical to the sequence set forth in SEQ ID NO: 363 and a heavy chain comprising an amino acid sequence that is at least 85%, 86%, 87%, 88%, 89%, 90%, 91%, 92%, 93%, 94%, 95%, 96%, 97%, 98% or 99% identical to the sequence set forth in SEQ ID NO: 362. In specific embodiments, the C5 antigen binding fragment comprises a heavy chain comprising an amino acid sequence of SEQ ID NO: 362 with 1, 2, 3, 4, 5, 6, 7, 8, 9, 10, 11, 12, 13, 14, 15 or more amino acid substitutions, insertions or deletions, and the substitutions, insertions or deletions are made for example, in the framework regions (e.g., those regions outside of the CDRs, which CDRs are underlined in FIG. 10D) or are substitutions with an amino acid present at that position in the heavy chain of one or more of the other therapeutic antibodies, for example, as identified by the alignment in FIG. 20A. In specific embodiments, the C5 antigen binding fragment comprises a light chain comprising an amino acid sequence of SEQ ID NO: 363 with 1, 2, 3, 4, 5, 6, 7, 8, 9, 10, 11, 12, 13, 14, 15 or more amino acid substitutions, insertions or deletions, and the substitutions, insertions or deletions are made for example, in the framework regions (e.g., those regions outside of the CDRs, which CDRs are underlined in FIG. 10D) or are substitutions with an amino acid present at that position in the light chain of one or more of the other therapeutic antibodies, for example, as identified by the alignment in FIG. 20B.

[0898] In certain embodiments, the anti-C5 antigen-binding fragment transgene encodes a hyperglycosylated ravulizumab Fab, comprising a heavy chain and a light chain of SEQ ID NOs: 362 and 363, respectively, with one or more of the following mutations: L117N (heavy chain), Q160N or Q160S (light chain), and/or E195N (light chain) (see FIG. 20A (heavy chain) and B (light chain)).

[0899] In certain embodiments, the anti-C5 antigen-binding fragment transgene encodes an antigen-binding fragment and comprises the nucleotide sequences encoding the six ravulizumab CDRs which are underlined in the heavy and light chain variable domain sequences of FIG. 10D which are spaced between framework regions, generally human framework regions, and associated with constant domains depending upon the form of the antigen-binding molecule, as is known in the art to form the heavy and/or light chain variable domain of an anti-C5 antibody or antigen-binding fragment thereof.

[0900] Gene Therapy Methods

[0901] Provided are methods of treating human subjects for one or more ocular disorders by administration of a viral vector containing a transgene encoding an anti-ENG, anti-C5, or anti-ALK1 antibody or antigen binding fragment thereof. The antibody or Fab fragment thereof may be ascrinvacumab, tesidolumab, ravulizumab, or carotuximab. In embodiments, the patient has been diagnosed with and/or has symptoms associated with one or more of the various ocular disorders listed above. Recombinant vector used for delivering the transgene are described in Section 5.4.3. Such vectors should have a tropism for human retina-type cells and can include non-replicating rAAV, particularly those bearing an AAV8 capsid. Alternatively, vectors bearing an AAV2.7m8 or AAV9 capsid can be used for ocular indications. The recombinant vectors, such as the ones shown in FIGS. 10A-D, can be administered in any manner such that the recombinant vector enters the retina, e.g., by introducing the recombinant vector into the eye. See Section 5.5.3 for details regarding the methods of treatment.

[0902] Subjects to whom such gene therapy is administered can be those responsive to anti-ALK1, anti-C5, or anti-ENG. In some embodiments, the methods encompass treating patients who have been diagnosed with one or more retinal disorders or, in the case of an anti-C5 antibody, non-infectious uveitis, or have one or more symptoms associated therewith, and identified as responsive to treatment with an anti-ALK1, anti-C5, or anti-ENG antibody or considered a good candidate for therapy with an anti-ALK1, anti-C5, or anti-ENG antibody. In specific embodiments, the patients have previously been treated with ascrinvacumab, tesidolumab, ravulizumab, or carotuximab and have been found to be responsive to ascrinvacumab, tesidolumab, ravulizumab, or carotuximab. To determine responsiveness, the anti-ALK1, anti-C5, or anti-ENG or antigen-binding fragment transgene product (e.g., produced in cell culture, bioreactors, etc.) may be administered directly to the subject.

[0903] Human Post Translationally Modified Antibodies

[0904] The production of the anti-ALK1, anti-C5, or anti-ENG HuPTM mAb or HuPTM Fab, should result in a “biobetter” molecule for the treatment of one or more retinal disorders, or in the of case those derived from anti-C5 for the treatment of non-infectious uveitis, accomplished via gene therapy—e.g., by administering a viral vector or other DNA expression construct encoding the anti-ALK1, anti-C5, or anti-ENG HuPTM Fab, subretinally, intravitreally, or suprachoroidally to human subjects (patients) diagnosed with or having one or more symptoms of one or more retinal disorders or non-infectious uveitis, to create a permanent depot in the retina that continuously supplies the fully-human post-translationally modified, e.g., human-glycosylated, sulfated transgene product produced by transduced cells of the retina.

[0905] As an alternative, or an additional treatment to gene therapy, the anti-ALK1, anti-C5, or anti-ENG HuPTM mAb or HuPTM Fab can be produced in human cell lines by recombinant DNA technology and administered to patients diagnosed with a retinal or ocular disorder for whom therapy for a retinal or ocular disorder is considered appropriate.

[0906] In specific embodiments, the anti-ALK1 HuPTM mAb or antigen-binding fragment thereof has heavy and light chains with the amino acid sequences of the heavy and light chain Fab portions of ascrinvacumab as set forth in FIG. 10A (with glutamine (Q) glycosylation sites; asparaginal (N) glycosylation sites, non-consensus asparaginal (N) glycosylation sites; and tyrosine-O-sulfation sites (Y) are as indicated in the legend) has a glycosylation, particularly a 2,6-sialylation, at one or more of the amino acid positions N62, N78, Q110, N160, N193, and/or N202 of the heavy chain (SEQ ID NO: 37) or Q101, N159, and/or N211 of the light chain (SEQ ID NO: 38). Alternatively or in addition to, the HuPTM mAb or antigen binding-fragment thereof with the heavy and light chain variable domain sequences of ascrinvacumab has a sulfation group at Y95, Y96, and/or Y199 of the heavy chain (SEQ ID NO: 37) and/or Y87 and/or Y88 of the light chain (SEQ ID NO: 38). In other embodiments, the anti-ALK1 HuPTM mAb or antigen-binding fragment thereof does not contain detectable NeuGc moieties and/or does not contain detectable alpha-Gal moieties. In certain embodiments, the HuPTM mAb is a full length or substantially full length mAb with an Fc region.

[0907] In specific embodiments, the anti-C5 HuPTM mAb or antigen-binding fragment thereof has heavy and light chains with the amino acid sequences of the heavy and light chain Fab portions of tesidolumab as set forth in FIG. 10B (with glutamine (Q) glycosylation sites; asparaginal (N) glycosylation sites, non-consensus asparaginal (N) glycosylation sites; and tyrosine-O-sulfation sites (Y) are as indicated in the legend has a glycosylation, particularly a 2,6-sialylation, at one or more of the amino acid positions N59, Q108, and/or N158 of the heavy chain (SEQ ID NO: 39) or N68, N95, and/or N172 of the light chain (SEQ ID NO: 40). Alternatively or in addition to, the HuPTM mAb or antigen binding-fragment thereof with the heavy and light chain variable domain sequences of tesidolumab has a sulfation group at Y94 and/or Y95 of the heavy chain (SEQ ID NO: 39) and/or Y30, Y85, and/or Y86 of the light chain (SEQ ID NO: 40). In other embodiments, the anti-C5 HuPTM mAb or antigen-binding fragment thereof does not contain detectable NeuGc moieties and/or does not contain detectable alpha-Gal moieties. In certain embodiments, the HuPTM mAb is a full length or substantially full length mAb with an Fc region.

[0908] In specific embodiments, the anti-C5 HuPTM mAb or antigen-binding fragment thereof has heavy and light chains with the amino acid sequences of the heavy and light chain Fab portions of ravulizumab as set forth in FIG. 10D (with glutamine (Q) glycosylation sites; asparaginal (N) glycosylation sites, non-consensus asparaginal (N) glycosylation sites; and tyrosine-O-sulfation sites (Y) are as indicated in the legend) has a glycosylation, particularly a 2,6-sialylation, at one or more of the amino acid positions N63, N106, Q114, N164, N197, and/or N206 of the heavy chain (SEQ ID NO: 362) or N28, Q100, N158, and/or N210 of the light chain (SEQ ID NO: 363). Alternatively or in addition to, the HuPTM mAb or antigen binding-fragment thereof with the heavy and light chain variable domain sequences of ravulizumab has a sulfation group at Y94 and/or Y95 of the heavy chain (SEQ ID NO: 362) and/or Y86 and/or Y86 of the light chain (SEQ ID NO: 363). In other embodiments, the anti-C5 HuPTM mAb or antigen-binding fragment thereof does not contain detectable NeuGc moieties and/or does not contain detectable alpha-Gal moieties. In certain embodiments, the HuPTM mAb is a full length or substantially full length mAb with an Fc region.

[0909] In specific embodiments, the anti-ENG HuPTM mAb or antigen-binding fragment thereof has heavy and light chains with the amino acid sequences of the heavy and light chain Fab portions of carotuximab as set forth in FIG. 10C (with glutamine (Q) glycosylation sites; asparaginal (N) glycosylation sites, non-consensus asparaginal (N) glycosylation sites; and tyrosine-O-sulfation sites (Y) are as indicated in the legend) has a glycosylation, particularly a 2,6-sialylation, at one or more of the amino acid positions Q110 and/or N160 of the heavy chain (SEQ ID NO: 41) or N52, N93, N157, and/or N209 of the light chain (SEQ ID NO: 42). Alternatively or in addition to, the HuPTM mAb or antigen binding-fragment thereof with the heavy and light chain variable domain sequences of carotuximab has a sulfation group at Y95 and/or Y96 of the heavy chain (SEQ ID NO: 41) and/or Y85 and/or Y86 of the light chain (SEQ ID NO: 42). In other embodiments, the anti-ENG HuPTM mAb or antigen-binding fragment thereof does not contain detectable NeuGc moieties and/or does not contain detectable alpha-Gal moieties. In certain embodiments, the HuPTM mAb is a full length or substantially full length mAb with an Fc region.

[0910] In certain embodiments, the HuPTM mAb or Fab is therapeutically effective and is at least 0.5%, 1% or 2% glycosylated and/or sulfated and may be at least 5%, 10% or even 50% or 100% glycosylated and/or sulfated. The goal of gene therapy treatment provided herein is to slow or arrest the progression of an ocular disorder. In the case of retinal disorders, efficacy may be monitored by monitoring vision acuity. For example, efficacy can be monitored by assessing change in vision acuity. In the case of uveitis, efficacy may be monitored by monitoring vision acuity, redness of the eye, sensitivity to light, and/or eye pain. For example, efficacy can be monitored by assessing change in vision acuity, redness of the eye, sensitivity to light, and/or eye pain from baseline.

[0911] Combinations of delivery of the anti-ALK1, anti-C5, or anti-ENG HuPTM mAb or antigen-binding fragment thereof to the retina accompanied by delivery of other available treatments are encompassed by the methods provided herein. The additional treatments may be administered before, concurrently, or subsequent to the gene therapy treatment. Available treatments for macular degeneration that could be combined with the gene therapy provided herein include but are not limited to laser photocoagulation, photodynamic therapy with verteporfin, aflibercept, anti-VEGF agents, and/or intravitreal steroids and administration with anti-ALK1, anti-C5, or anti-ENG agents, including but not limited to ascrinvacumab, tesidolumab, ravulizumab, or carotuximab. In the case of uveitis, available treatments for a subject that could be combined with the gene therapy provided herein include but are not limited to, azathioprine, methotrexate, mycophenolate mofetil, cyclosporine, cyclophosphamide, corticosteroids (local and/or systemic), and others and administration with anti-ALK1, anti-C5, or anti-ENG agents, including but not limited to ascrinvacumab, tesidolumab, ravulizumab, or carotuximab.

### 5.3.10. Anti-CC1Q HuPTM Constructs and Formulations for Glaucoma

[0912] Compositions and methods are described for the delivery of HuPTM mAb and antigen-binding fragments thereof, such as HuPTM Fabs, that bind to complement component 1Q (CC1Q) indicated for treating glaucoma. In certain embodiments, the HuPTM mAb has the amino acid sequence of ANX-007 or an antigen binding fragment of the foregoing. The amino acid sequence of Fab fragments of ANX-007 are provided in FIG. 11. Delivery may be accomplished via gene therapy—e.g., by administering a viral vector or other DNA expression construct encoding a CC1Q-binding HuPTM mAb (or an antigen binding fragment and/or a hyperglycosylated derivative or other derivative, thereof, including an scFv) to patients (human subjects) diagnosed with, or having one or more symptoms of glaucoma to create a permanent depot that continuously supplies the human PTM, e.g., human-glycosylated, transgene product.

[0913] Transgenes

[0914] Provided are recombinant vectors containing a transgene encoding a HuPTM mAb or HuPTM Fab (or other antigen binding fragment of the HuPTM mAb) that binds to CC1Q that can be administered to deliver the HuPTM mAb or antigen binding fragment in a patient. The transgene is a nucleic acid comprising the nucleotide sequences encoding an antigen binding fragment of an antibody that binds to CC1Q, such as ANX-007, or variants thereof as detailed herein. The transgene may also encode an anti-CC1Q antigen binding fragment that contains additional glycosylation sites (e.g., see Courtois et al.).

[0915] In certain embodiments, the anti-CC1Q antigen-binding fragment transgene comprises the nucleotide sequences encoding the heavy and light chains of the Fab portion of ANX-007 (having amino acid sequences of SEQ ID NOs. 43 and 44, respectively, see Table 5 and FIG. 11). The nucleotide sequences may be codon optimized for expression in human cells. Nucleotide sequences may, for example, comprise the nucleotide sequences of SEQ ID NO: 113 (encoding the ANX-007 heavy chain Fab portion) and SEQ ID NO: 114 (encoding the ANX-007 light chain Fab portion) as set forth in Table 6. The heavy and light chain sequences both have a signal or leader sequence at the N-terminus appropriate for expression and secretion in human cells, in particular, one or more cells forming the retina. The signal sequence may have the amino acid sequence of MYRMQLLLLIALSLALVTNS (SEQ ID NO: 146). Alternatively, the signal sequence may have an amino acid sequence selected from any one of the signal sequences set forth in Table 2 that correspond to the proteins secreted by one or more cells forming the retina. Alternatively, the signal sequence may be appropriate for expression in muscle or liver cells, such as those listed in Tables 3 and 4 infra.

[0916] In addition to the heavy and light chain variable domain and C_{H}1 and C_{L} domain sequences, the transgenes may comprise, at the C-terminus of the heavy chain C_{H}1 domain sequence, all or a portion of the hinge region. In specific embodiments, the anti-CC1Q antigen binding domain has a heavy chain Fab domain of SEQ ID NO: 43 with additional hinge region sequence starting after the C-terminal valine (V), contains all or a portion of the amino acid sequence EPKSCDKTHTCPPCPAPELLGG (SEQ ID NO: 194), and specifically, EPKSCDKTHL (SEQ ID NO: 196), EPKSCDKTHT (SEQ ID NO: 197), EPKSCDKTHTCPPCPA (SEQ ID NO: 198), EPKSCDKTHLCPPCPA (SEQ ID NO: 199), EPKSCDKTHTCPPCPAPELLGGPSVFL (SEQ ID NO: 200), or EPKSCDKTHLCPPCPAPELLGGPSVFL (SEQ ID NO: 201) as set forth in FIG. 11. These hinge regions may be encoded by nucleotide sequences at the 3′ end of SEQ ID NO: 113 by the hinge region encoding sequences set forth in Table 6 (SEQ ID NO: 113). In another embodiment, the transgenes comprise the amino acid sequences encoding the full length (or substantially full length) heavy and light chains of the antibody, comprising the Fc domain at the C terminus of the heavy chain, e.g. an IgG1 Fc domain, such as SEQ ID No. 283 or as depicted in FIG. 23, or a mutant or variant thereof. The Fc domain may be engineered for altered binding to one or more Fc receptors and/or effector function as disclosed in Section 5.1.9, infra.

[0917] In certain embodiments, the anti-CC1Q antigen-binding fragment transgene encodes an CC1Q antigen-binding fragment comprising a light chain comprising an amino acid sequence that is at least 85%, 86%, 87%, 88%, 89%, 90%, 91%, 92%, 93%, 94%, 95%, 96%, 97%, 98% or 99% identical to the sequence set forth in SEQ ID NO: 44. In certain embodiments, the anti-CC1Q antigen-binding fragment transgene encodes an CC1Q antigen-binding fragment comprising a heavy chain comprising an amino acid sequence that is at least 85%, 86%, 87%, 88%, 89%, 90%, 91%, 92%, 93%, 94%, 95%, 96%, 97%, 98% or 99% identical to the sequence set forth in SEQ ID NO: 43. In certain embodiments, the anti-CC1Q antigen-binding fragment transgene encodes an antigen-binding fragment comprising a light chain comprising an amino acid sequence that is at least 85%, 86%, 87%, 88%, 89%, 90%, 91%, 92%, 93%, 94%, 95%, 96%, 97%, 98% or 99% identical to the sequence set forth in SEQ ID NO: 44 and a heavy chain comprising an amino acid sequence that is at least 85%, 86%, 87%, 88%, 89%, 90%, 91%, 92%, 93%, 94%, 95%, 96%, 97%, 98% or 99% identical to the sequence set forth in SEQ ID NO: 43. In specific embodiments, the CC1Q antigen binding fragment comprises a heavy chain comprising an amino acid sequence of SEQ ID NO: 43 with 1, 2, 3, 4, 5, 6, 7, 8, 9, 10, 11, 12, 13, 14, 15 or more amino acid substitutions, insertions or deletions, and the substitutions, insertions or deletions are made, e.g., in the framework regions (e.g., those regions outside of the CDRs, which CDRs are underlined in FIG. 11) or are substitutions with an amino acid present at that position in the heavy chain of one or more of the other therapeutic antibodies, for example, as identified by the alignment in FIG. 20A. In specific embodiments, the CC1Q antigen binding fragment comprises a light chain comprising an amino acid sequence of SEQ ID NO: 44 with 1, 2, 3, 4, 5, 6, 7, 8, 9, 10, 11, 12, 13, 14, 15 or more amino acid substitutions, insertions or deletions, and the substitutions, insertions or deletions are made, e.g., in the framework regions (e.g., those regions outside of the CDRs, which CDRs are underlined in FIG. 11) or are substitutions with an amino acid present at that position in the light chain of one or more of the other therapeutic antibodies, for example, as identified by the alignment in FIG. 20B.

[0918] In certain embodiments, the anti-CC1Q antigen-binding fragment transgene encodes a hyperglycosylated ANX-007 Fab, comprising a heavy chain and a light chain of SEQ ID NOs: 43 and 44, respectively, with one or more of the following mutations: T116N (heavy chain), Q160N or Q160S (light chain), and/or E195N (light chain) (see FIGS. 20A (heavy chain) and 20B (light chain)).

[0919] In certain embodiments, the anti-CC1Q antigen-binding fragment transgene encodes an antigen-binding fragment and comprises the nucleotide sequences encoding the six ANX-007 CDRs which are underlined in the heavy and light chain variable domain sequences of FIG. 11 which are spaced between framework regions, generally human framework regions, and associated with constant domains depending upon the form of the antigen-binding molecule, as is known in the art to form the heavy and/or light chain variable domain of an anti-CC1Q antibody or antigen-binding fragment thereof.

[0920] Gene Therapy Methods

[0921] Provided are methods of treating human subjects for glaucoma by administration of a viral vector containing a transgene encoding an anti-CC1Q antibody or antigen binding fragment thereof. The antibody or Fab fragment thereof may be ANX-007. In embodiments, the patient has been diagnosed with and/or has symptoms associated with one or more of the various retinal disorders listed above.

[0922] Recombinant vector used for delivering the transgene are described in Section 5.4.3. Such vectors should have a tropism for human retina-type cells and can include non-replicating rAAV, particularly those bearing an AAV8 capsid. Alternatively, vectors bearing an AAV2.7m8 or AAV9 capsid can be used for ocular indications. The recombinant vectors, such as the ones shown in FIG. 11, can be administered in any manner such that the recombinant vector enters the retina, e.g. by introducing the recombinant vector into the eye. See Section 5.5.3 for details regarding the methods of treatment.

[0923] Subjects to whom such gene therapy is administered can be those responsive to anti-CC1Q. In certain embodiments, the methods encompass treating patients who have been diagnosed with glaucoma, or have one or more symptoms associated therewith, and identified as responsive to treatment with an anti-CC1Q antibody or considered a good candidate for therapy with an anti-CC1Q antibody. In specific embodiments, the patients have previously been treated with ANX-007, and have been found to be responsive to ANX-007. To determine responsiveness, the anti-CC1Q or antigen-binding fragment transgene product (e.g., produced in cell culture, bioreactors, etc.) may be administered directly to the subject.

[0924] Human Post Translationally Modified Antibodies

[0925] The production of the anti-CC1Q HuPTM mAb or HuPTM Fab, should result in a “biobetter” molecule for the treatment of one or more retinal disorders accomplished via gene therapy—e.g., by administering a viral vector or other DNA expression construct encoding the anti-CC1Q HuPTM Fab, subretinally, intravitreally, or suprachoroidally to human subjects (patients) diagnosed with or having one or more symptoms of glaucoma, to create a permanent depot in the retina that continuously supplies the fully-human post-translationally modified, e.g., human-glycosylated, sulfated transgene product produced by transduced cells of the retina.

[0926] As an alternative, or an additional treatment to gene therapy, the anti-CC1Q HuPTM mAb or HuPTM Fab can be produced in human cell lines by recombinant DNA technology, and administered to patients diagnosed with glaucoma or for whom therapy for glaucoma is considered appropriate.

[0927] In specific embodiments, the anti-CC1Q HuPTM mAb or antigen-binding fragment thereof has heavy and light chains with the amino acid sequences of the heavy and light chain Fab portions of ANX-007 as set forth in FIG. 11 (with glutamine (Q) glycosylation sites; asparaginal (N) glycosylation sites, non-consensus asparaginal (N) glycosylation sites; and tyrosine-O-sulfation sites (Y) are as indicated in the legend) has a glycosylation, particularly a 2,6-sialylation, at one or more of the amino acid positions N59, Q113, and/or N163 of the heavy chain (SEQ ID NO: 43) or N22, N30, Q100, N158, and/or N210 of the light chain (SEQ ID NO: 44). Alternatively or in addition to, the HuPTM mAb or antigen binding-fragment thereof with the heavy and light chain variable domain sequences of ANX-007 has a sulfation group at Y60, Y94, and/or Y95 of the heavy chain (SEQ ID NO: 43) and/or Y86 and/or Y87 of the light chain (SEQ ID NO: 44). In other embodiments, the anti-CC1Q HuPTM mAb or antigen-binding fragment thereof does not contain detectable NeuGc moieties and/or does not contain detectable alpha-Gal moieties. In certain embodiments, the HuPTM mAb is a full length or substantially full length mAb with an Fc region.

[0928] In certain embodiments, the HuPTM mAb or Fab is therapeutically effective and is at least 0.5%, 1% or 2% glycosylated and/or sulfated and may be at least 5%, 10% or even 50% or 100% glycosylated and/or sulfated. The goal of gene therapy treatment provided herein is to slow or arrest the progression of glaucoma. In the case of glaucoma, efficacy may be monitored by monitoring vision acuity, eye pain, or intraocular pressure (TOP). For example, efficacy can be monitored by assessing change in TOP, vision acuity, and pain from baseline.

[0929] Combinations of delivery of the anti-CC1Q HuPTM mAb or antigen-binding fragment thereof to the retina accompanied by delivery of other available treatments are encompassed by the methods provided herein. The additional treatments may be administered before, concurrently, or subsequent to the gene therapy treatment. Available treatments for glaucoma that could be combined with the gene therapy provided herein include but are not limited to prostaglandins (XALATAN®, LUMIGAN®, TRAVATAN Z®, and RESCULA®), alpha-andronergic agonists (IOPIDINE®, ALPHAGAN®, and ALPHAGAN-P®), carbonic anhydrase inhibitors (TRUSOPT®, AZOPT®, DIAMOX®, NEPTAZANE®, and DARANIDE®), parasympathomimetics (PILOCARPINE®, CARBACHOL®, ECHOTHIOPHATE®, DEMACARIUM®), and/or beta-blocker (TIMOPTIC XE®, ISTALOL®, BETOPTIC S®) and administration with anti-CC1Q agents, including but not limited ANX-007.

### 5.3.11. Anti-TNFα HuPTM Constructs and Formulations for Non-Infectious Uveitis

[0930] Compositions and methods are described for the delivery of HuPTM mAbs and antigen-binding fragments thereof, such as HuPTM Fabs, that bind to tumor necrosis factor-alpha (TNFα), such as adalimumab (FIG. 12A), infliximab (FIG. 12B), or golimumab (FIG. 12C) and indicated for treating non-infectious uveitis. In certain embodiments, the HuPTM mAb has the amino acid sequence of adalimumab, infliximab, golimumab, or an antigen binding fragment thereof. Amino acid sequences of Fab fragments of the antibody are provided in FIGS. 12A-C. Delivery may be accomplished via gene therapy—e.g., by administering a viral vector or other DNA expression construct encoding an TNFα-binding HuPTM mAb (or an antigen binding fragment and/or a hyperglycosylated derivative or other derivative, thereof) to patients (human subjects) diagnosed with one or more symptoms of non-infectious uveitis to create a permanent depot that continuously supplies the human PTM, e.g., human-glycosylated, transgene product.

[0931] Transgenes

[0932] Provided are recombinant vectors containing a transgene encoding a HuPTM mAb or HuPTM Fab (or other antigen binding fragment of the HuPTM mAb) that binds to TNFα that can be administered to deliver the HuPTM mAb or antigen binding fragment in a patient. The transgene is a nucleic acid comprising the nucleotide sequences encoding an antigen binding fragment of an antibody that binds to TNFα, such as adalimumab, infliximab, golimumab, or variants thereof as detailed herein. The transgene may also encode an anti-TNFα antigen binding fragment that contains additional glycosylation sites (e.g., see Courtois et al.).

[0933] In certain embodiments, the anti-TNFα antigen-binding fragment transgene comprises the nucleotide sequences encoding the heavy and light chains of the Fab portion of adalimumab (having amino acid sequences of SEQ ID NOs. 45 and 46, respectively, see Table 5 and FIG. 12A). The nucleotide sequences may be codon optimized for expression in human cells. Nucleotide sequences may, for example, comprise the nucleotide sequences of SEQ ID NO: 115 (encoding the adalimumab heavy chain Fab portion) and SEQ ID NO: 116 (encoding the adalimumab light chain Fab portion) as set forth in Table 6. The heavy and light chain sequences both have a signal or leader sequence at the N-terminus appropriate for expression and secretion in human cells, in particular, one or more cells forming the retina. The signal sequence may have the amino acid sequence of MYRMQLLLLIALSLALVTNS (SEQ ID NO: 146). Alternatively, the signal sequence may have an amino acid sequence selected from any one of the signal sequences set forth in Table 2 that correspond to the proteins secreted by one or more cells forming the retina. Alternatively, the signal sequence may be appropriate for expression in muscle or liver cells, such as those listed in Tables 3 and 4 infra.

[0934] In addition to the heavy and light chain variable domain and C_{H}1 and C_{L} domain sequences, the transgenes may comprise, at the C-terminus of the heavy chain C_{H}1 domain sequence, all or a portion of the hinge region. In specific embodiments, the anti-TNFα-antigen binding domain has a heavy chain Fab domain of SEQ ID NO: 45 with additional hinge region sequence starting after the C-terminal valine (V), contains all or a portion of the amino acid sequence EPKSCDKTHTCPPCPAPELLGG (SEQ ID NO: 194), and specifically, EPKSCDKTHL (SEQ ID NO: 196), EPKSCDKTHT (SEQ ID NO: 197), EPKSCDKTHTCPPCPA (SEQ ID NO: 198), EPKSCDKTHLCPPCPA (SEQ ID NO: 199), EPKSCDKTHTCPPCPAPELLGGPSVFL (SEQ ID NO: 200) or EPKSCDKTHLCPPCPAPELLGGPSVFL (SEQ ID NO: 201) as set forth in FIG. 12A. These hinge regions may be encoded by nucleotide sequences at the 3′ end of SEQ ID NO: 115 by the hinge region encoding sequences set forth in Table 6 (SEQ ID NO: 115). In another embodiment, the transgenes comprise the amino acid sequences encoding the full length (or substantially full length) heavy and light chains of the antibody, comprising the Fc domain at the C terminus of the heavy chain, e.g., having an amino acid sequence of SEQ ID NO: 303 (Table 7) or an IgG1 Fc domain, such as SEQ ID No. 283 or as depicted in FIG. 23, or a mutant or variant thereof. The Fc domain may be engineered for altered binding to one or more Fc receptors and/or effector function as disclosed in Section 5.1.9, infra.

[0935] In certain embodiments, the anti-TNFα antigen-binding fragment transgene encodes an TNFα antigen-binding fragment comprising a light chain comprising an amino acid sequence that is at least 85%, 86%, 87%, 88%, 89%, 90%, 91%, 92%, 93%, 94%, 95%, 96%, 97%, 98% or 99% identical to the sequence set forth in SEQ ID NO: 46. In certain embodiments, the anti-TNFα antigen-binding fragment transgene encodes an TNFα antigen-binding fragment comprising a heavy chain comprising an amino acid sequence that is at least 85%, 86%, 87%, 88%, 89%, 90%, 91%, 92%, 93%, 94%, 95%, 96%, 97%, 98% or 99% identical to the sequence set forth in SEQ ID NO: 45. In certain embodiments, the anti-TNFα antigen-binding fragment transgene encodes an antigen-binding fragment comprising a light chain comprising an amino acid sequence that is at least 85%, 86%, 87%, 88%, 89%, 90%, 91%, 92%, 93%, 94%, 95%, 96%, 97%, 98% or 99% identical to the sequence set forth in SEQ ID NO: 46 and a heavy chain comprising an amino acid sequence that is at least 85%, 86%, 87%, 88%, 89%, 90%, 91%, 92%, 93%, 94%, 95%, 96%, 97%, 98% or 99% identical to the sequence set forth in SEQ ID NO: 45. In specific embodiments, the TNFα antigen binding fragment comprises a heavy chain comprising an amino acid sequence of SEQ ID NO: 45 with 1, 2, 3, 4, 5, 6, 7, 8, 9, 10, 11, 12, 13, 14, 15 or more amino acid substitutions, insertions or deletions, and the substitutions, insertions or deletions are made, e.g., in the framework regions (e.g., those regions outside of the CDRs, which CDRs are underlined in FIG. 12A) or are substitutions with an amino acid present at that position in the heavy chain of one or more of the other therapeutic antibodies, for example, as identified by the alignment in FIG. 20A. In specific embodiments, the TNFα antigen binding fragment comprises a light chain comprising an amino acid sequence of SEQ ID NO: 46 with 1, 2, 3, 4, 5, 6, 7, 8, 9, 10, 11, 12, 13, 14, 15 or more amino acid substitutions, insertions or deletions, and the substitutions, insertions or deletions are made, e.g., in the framework regions (e.g., those regions outside of the CDRs, which CDRs are underlined in FIG. 12A) or are substitutions with an amino acid present at that position in the light chain of one or more of the other therapeutic antibodies, for example, as identified by the alignment in FIG. 20B.

[0936] In certain embodiments, the anti-TNFα antigen-binding fragment transgene encodes a hyperglycosylated adalimumab Fab, comprising a heavy chain and a light chain of SEQ ID NOs: 45 and 46, respectively, with one or more of the following mutations: L116N (heavy chain), Q160N or Q160S (light chain), and/or E195N (light chain) (see FIGS. 20A (heavy chain) and 20B (light chain)).

[0937] In certain embodiments, the anti-TNFα antigen-binding fragment transgene encodes an antigen-binding fragment and comprises the nucleotide sequences encoding the six adalimumab CDRs which are underlined in the heavy and light chain variable domain sequences of FIG. 12A which are spaced between framework regions, generally human framework regions, and associated with constant domains depending upon the form of the antigen-binding molecule, as is known in the art to form the heavy and/or light chain variable domain of an anti-TNFα antibody or antigen-binding fragment thereof.

[0938] In certain embodiments, the anti-TNFα antigen-binding fragment transgene comprises the nucleotide sequences encoding the heavy and light chains of the Fab portion of infliximab (having amino acid sequences of SEQ ID NOs. 47 and 48, respectively, see Table 5 and FIG. 12B). The nucleotide sequences may be codon optimized for expression in human cells. Nucleotide sequences may, for example, comprise the nucleotide sequences of SEQ ID NO: 117 (encoding the infliximab heavy chain Fab portion) and SEQ ID NO: 118 (encoding the infliximab light chain Fab portion) as set forth in Table 6. The heavy and light chain sequences both have a signal or leader sequence at the N-terminus appropriate for expression and secretion in human cells, in particular, one or more cells forming the retina. The signal sequence may have the amino acid sequence of MYRMQLLLLIALSLALVTNS (SEQ ID NO: 146). Alternatively, the signal sequence may have an amino acid sequence selected from any one of the signal sequences set forth in Table 2 that correspond to the proteins secreted by one or more cells forming the retina. Alternatively, the signal sequence may be appropriate for expression in muscle or liver cells, such as those listed in Tables 3 and 4 infra.

[0939] In addition to the heavy and light chain variable domain and C_{H}1 and C_{L} domain sequences, the transgenes may comprise, at the C-terminus of the heavy chain C_{H}1 domain sequence, all or a portion of the hinge region. In specific embodiments, the anti-TNFα-antigen binding domain has a heavy chain Fab domain of SEQ ID NO: 47 with additional hinge region sequence starting after the C-terminal valine (V), contains all or a portion of the amino acid sequence EPKSCDKTHTCPPCPAPELLGG (SEQ ID NO: 194), and specifically, EPKSCDKTHL (SEQ ID NO: 196), EPKSCDKTHT (SEQ ID NO: 197), EPKSCDKTHTCPPCPA (SEQ ID NO: 198), EPKSCDKTHLCPPCPA (SEQ ID NO: 199), EPKSCDKTHTCPPCPAPELLGGPSVFL (SEQ ID NO: 200) or EPKSCDKTHLCPPCPAPELLGGPSVFL (SEQ ID NO: 201) as set forth in FIG. 12B. These hinge regions may be encoded by nucleotide sequences at the 3′ end of SEQ ID NO: 117 by the hinge region encoding sequences set forth in Table 6 (SEQ ID NO: 117). In another embodiment, the transgenes comprise the amino acid sequences encoding the full length (or substantially full length) heavy and light chains of the antibody, comprising the Fc domain at the C terminus of the heavy chain, e.g. having an amino acid sequence of SEQ ID NO: 304 (Table 7) or an IgG1 Fc domain, such as SEQ ID No. 283 or as depicted in FIG. 23, or a mutant or variant thereof. The Fc domain may be engineered for altered binding to one or more Fc receptors and/or effector function as disclosed in Section 5.1.9, infra.

[0940] In certain embodiments, the anti-TNFα antigen-binding fragment transgene encodes an TNFα antigen-binding fragment comprising a light chain comprising an amino acid sequence that is at least 85%, 86%, 87%, 88%, 89%, 90%, 91%, 92%, 93%, 94%, 95%, 96%, 97%, 98% or 99% identical to the sequence set forth in SEQ ID NO: 48. In certain embodiments, the anti-TNFα antigen-binding fragment transgene encodes an TNFα antigen-binding fragment comprising a heavy chain comprising an amino acid sequence that is at least 85%, 86%, 87%, 88%, 89%, 90%, 91%, 92%, 93%, 94%, 95%, 96%, 97%, 98% or 99% identical to the sequence set forth in SEQ ID NO: 47. In certain embodiments, the anti-TNFα antigen-binding fragment transgene encodes an antigen-binding fragment comprising a light chain comprising an amino acid sequence that is at least 85%, 86%, 87%, 88%, 89%, 90%, 91%, 92%, 93%, 94%, 95%, 96%, 97%, 98% or 99% identical to the sequence set forth in SEQ ID NO: 48 and a heavy chain comprising an amino acid sequence that is at least 85%, 86%, 87%, 88%, 89%, 90%, 91%, 92%, 93%, 94%, 95%, 96%, 97%, 98% or 99% identical to the sequence set forth in SEQ ID NO: 47. In specific embodiments, the TNFα antigen binding fragment comprises a heavy chain comprising an amino acid sequence of SEQ ID NO: 47 with 1, 2, 3, 4, 5, 6, 7, 8, 9, 10, 11, 12, 13, 14, 15 or more amino acid substitutions, insertions or deletions, and the substitutions, insertions or deletions are made, e.g., in the framework regions (e.g., those regions outside of the CDRs, which CDRs are underlined in FIG. 12B) or are substitutions with an amino acid present at that position in the heavy chain of one or more of the other therapeutic antibodies, for example, as identified by the alignment in FIG. 20A. In specific embodiments, the TNFα antigen binding fragment comprises a light chain comprising an amino acid sequence of SEQ ID NO: 48 with 1, 2, 3, 4, 5, 6, 7, 8, 9, 10, 11, 12, 13, 14, 15 or more amino acid substitutions, insertions or deletions, and the substitutions, insertions or deletions are made, for example, in the framework regions (e.g., those regions outside of the CDRs, which CDRs are underlined in FIG. 12B) or are substitutions with an amino acid present at that position in the light chain of one or more of the other therapeutic antibodies, for example, as identified by the alignment in FIG. 20B.

[0941] In certain embodiments, the anti-TNFα antigen-binding fragment transgene encodes a hyperglycosylated infliximab Fab, comprising a heavy chain and a light chain of SEQ ID NOs: 47 and 48, respectively, with one or more of the following mutations: T115N (heavy chain), Q160N or Q160S (light chain), and/or E195N (light chain) (see FIGS. 11A (heavy chain) and 20B (light chain)).

[0942] In certain embodiments, the anti-TNFα antigen-binding fragment transgene encodes an antigen-binding fragment and comprises the nucleotide sequences encoding the six infliximab CDRs which are underlined in the heavy and light chain variable domain sequences of FIG. 12B which are spaced between framework regions, generally human framework regions, and associated with constant domains depending upon the form of the antigen-binding molecule, as is known in the art to form the heavy and/or light chain variable domain of an anti-TNFα antibody or antigen-binding fragment thereof.

[0943] In certain embodiments, the anti-TNFα antigen-binding fragment transgene comprises the nucleotide sequences encoding the heavy and light chains of the Fab portion of golimumab (having amino acid sequences of SEQ ID NOs. 49 and 50, respectively, see Table 5 and FIG. 12C). The nucleotide sequences may be codon optimized for expression in human cells. Nucleotide sequences may, for example, comprise the nucleotide sequences of SEQ ID NO: 119 (encoding the golimumab heavy chain Fab portion) and SEQ ID NO: 120 (encoding the golimumab light chain Fab portion) as set forth in Table 6. The heavy and light chain sequences both have a signal or leader sequence at the N-terminus appropriate for expression and secretion in human cells, in particular, one or more cells forming the retina. The signal sequence may have the amino acid sequence of MYRMQLLLLIALSLALVTNS (SEQ ID NO: 146). Alternatively, the signal sequence may have an amino acid sequence selected from any one of the signal sequences set forth in Table 2 that correspond to the proteins secreted by one or more cells forming the retina. Alternatively, the signal sequence may be appropriate for expression in muscle or liver cells, such as those listed in Tables 3 and 4 infra.

[0944] In addition to the heavy and light chain variable domain and C_{H}1 and C_{L} domain sequences, the transgenes may comprise, at the C-terminus of the heavy chain C_{H}1 domain sequence, all or a portion of the hinge region. In specific embodiments, the anti-TNFα-antigen binding domain has a heavy chain variable domain of SEQ ID NO: 49 with additional hinge region sequence starting after the C-terminal valine (V), contains all or a portion of the amino acid sequence EPKSCDKTHTCPPCPAPELLGG (SEQ ID NO: 194), and specifically, EPKSCDKTHL (SEQ ID NO: 196), EPKSCDKTHT (SEQ ID NO: 197), EPKSCDKTHTCPPCPA (SEQ ID NO: 198), EPKSCDKTHLCPPCPA (SEQ ID NO: 199), EPKSCDKTHTCPPCPAPELLGGPSVFL (SEQ ID NO: 200) or EPKSCDKTHLCPPCPAPELLGGPSVFL (SEQ ID NO: 201) as set forth in FIG. 12C. These hinge regions may be encoded by nucleotide sequences at the 3′ end of SEQ ID NO: 119 by the hinge region encoding sequences set forth in Table 6 (SEQ ID NO: 119). In another embodiment, the transgenes comprise the amino acid sequences encoding the full length (or substantially full length) heavy and light chains of the antibody, comprising the Fc domain at the C terminus of the heavy chain, e.g., having an amino acid sequence of SEQ ID NO; 305 (Table 7) or an IgG1 Fc domain, such as SEQ ID No. 283 or as depicted in FIG. 23, or a mutant or variant thereof. The Fc domain may be engineered for altered binding to one or more Fc receptors and/or effector function as disclosed in Section 5.1.9, infra.

[0945] In certain embodiments, the anti-TNFα antigen-binding fragment transgene encodes an TNFα antigen-binding fragment comprising a light chain comprising an amino acid sequence that is at least 85%, 86%, 87%, 88%, 89%, 90%, 91%, 92%, 93%, 94%, 95%, 96%, 97%, 98% or 99% identical to the sequence set forth in SEQ ID NO: 50. In certain embodiments, the anti-TNFα antigen-binding fragment transgene encodes an TNFα antigen-binding fragment comprising a heavy chain comprising an amino acid sequence that is at least 85%, 86%, 87%, 88%, 89%, 90%, 91%, 92%, 93%, 94%, 95%, 96%, 97%, 98% or 99% identical to the sequence set forth in SEQ ID NO: 49. In certain embodiments, the anti-TNFα antigen-binding fragment transgene encodes an antigen-binding fragment comprising a light chain comprising an amino acid sequence that is at least 85%, 86%, 87%, 88%, 89%, 90%, 91%, 92%, 93%, 94%, 95%, 96%, 97%, 98% or 99% identical to the sequence set forth in SEQ ID NO: 50 and a heavy chain comprising an amino acid sequence that is at least 85%, 86%, 87%, 88%, 89%, 90%, 91%, 92%, 93%, 94%, 95%, 96%, 97%, 98% or 99% identical to the sequence set forth in SEQ ID NO: 49. In specific embodiments, the TNFα antigen binding fragment comprises a heavy chain comprising an amino acid sequence of SEQ ID NO: 49 with 1, 2, 3, 4, 5, 6, 7, 8, 9, 10, 11, 12, 13, 14, 15 or more amino acid substitutions, insertions or deletions, and the substitutions, insertions or deletions are made, for example, in the framework regions (e.g., those regions outside of the CDRs, which CDRs are underlined in FIG. 12C) or are substitutions with an amino acid present at that position in the heavy chain of one or more of the other therapeutic antibodies, for example, as identified by the alignment in FIG. 20A. In specific embodiments, the TNFα antigen binding fragment comprises a light chain comprising an amino acid sequence of SEQ ID NO: 50 with 1, 2, 3, 4, 5, 6, 7, 8, 9, 10, 11, 12, 13, 14, 15 or more amino acid substitutions, insertions or deletions, and the substitutions, insertions or deletions are made, e.g., in the framework regions (e.g., those regions outside of the CDRs, which CDRs are underlined in FIG. 12C) or are substitutions with an amino acid present at that position in the light chain of one or more of the other therapeutic antibodies, for example, as identified by the alignment in FIG. 20B.

[0946] In certain embodiments, the anti-TNFα antigen-binding fragment transgene encodes a hyperglycosylated golimumab Fab, comprising a heavy chain and a light chain of SEQ ID NOs: 49 and 50, respectively, with one or more of the following mutations: T124N (heavy chain), Q164N or Q164S (light chain), and/or E199N (light chain) (see FIGS. 20A (heavy chain) and 20B (light chain)).

[0947] In certain embodiments, the anti-TNFα antigen-binding fragment transgene encodes an antigen-binding fragment and comprises the nucleotide sequences encoding the six golimumab CDRs which are underlined in the heavy and light chain variable domain sequences of FIG. 12C which are spaced between framework regions, generally human framework regions, and associated with constant domains depending upon the form of the antigen-binding molecule, as is known in the art to form the heavy and/or light chain variable domain of an anti-TNFα antibody or antigen-binding fragment thereof.

[0948] Gene Therapy Methods

[0949] Provided are methods of treating human subjects for non-infectious uveitis by administration of a viral vector containing a transgene encoding an anti-TNFα antibody, or antigen binding fragment thereof. The antibody may be adalimumab, infliximab, or golimumab, and is, e.g., a full length or substantially full length antibody or Fab fragment thereof, or other antigen-binding fragment thereof. In embodiments, the patient has been diagnosed with and/or has symptom(s) associated with non-infectious uveitis. Recombinant vector used for delivering the transgene are described in Section 5.4.3. Such vectors should have a tropism for human retina-type cells and can include non-replicating rAAV, particularly those bearing an AAV8 capsid. Alternatively, vectors bearing an AAV2.7m8 or AAV9 capsid can be used for ocular indications. The recombinant vectors, such as the ones shown in FIG. 12A-C, can be administered in any manner such that the recombinant vector enters the retina, e.g. by introducing the recombinant vector into the eye. See Section 5.5.3 for details regarding the methods of treatment.

[0950] Subjects to whom such gene therapy is administered can be those responsive to anti-TNFα therapy. In certain embodiments, the methods encompass treating patients who have been diagnosed with non-infectious uveitis, or have one or more symptoms associated therewith, and identified as responsive to treatment with an anti-TNFα antibody or considered a good candidate for therapy with an anti-TNFα antibody. In specific embodiments, the patients have previously been treated with adalimumab, infliximab, or golimumab, and have been found to be responsive to adalimumab, infliximab, or golimumab. In other embodiments, the patients have been previously treated with an anti-TNF-alpha antibody or fusion protein such as etanercept, certolizumab, or other anti-TNF-alpha agent. To determine responsiveness, the anti-TNFα antibody or antigen-binding fragment transgene product (e.g., produced in cell culture, bioreactors, etc.) may be administered directly to the subject.

[0951] Human Post Translationally Modified Antibodies

[0952] The production of the anti-TNFα HuPTM mAb or HuPTM Fab, should result in a “biobetter” molecule for the treatment of non-infectious uveitis accomplished via gene therapy—e.g., by administering a viral vector or other DNA expression construct encoding the anti-TNFα HuPTM Fab, intravenously to human subjects (patients) diagnosed with or having one or more symptoms of non-infectious uveitis, to create a permanent depot in the retina that continuously supplies the fully-human post-translationally modified, e.g., human-glycosylated, sulfated transgene product produced by transduced liver or muscle cells.

[0953] In specific embodiments, the anti-TNFα HuPTM mAb or antigen-binding fragment thereof has heavy and light chains with the amino acid sequences of the heavy and light chain Fab portions of adalimumab as set forth in FIG. 12A (with glutamine (Q) glycosylation sites; asparaginal (N) glycosylation sites, non-consensus asparaginal (N) glycosylation sites; and tyrosine-O-sulfation sites (Y) are as indicated in the legend) has a glycosylation, particularly a 2,6-sialylation, at one or more of the amino acid positions N54, Q113, and/or N163 of the heavy chain (SEQ ID NO:45) or Q100, N158, and/or N210 of the light chain (SEQ ID NO:46). Alternatively or in addition to, the HuPTM mAb or antigen binding-fragment thereof with the heavy and light chain variable domain sequences of adalimumab has a sulfation group at Y32, Y94 and/or Y95 of the heavy chain (SEQ ID NO:45) and/or Y86 and/or Y87 of the light chain (SEQ ID NO:46). In other embodiments, the anti-TNFα HuPTM mAb or antigen-binding fragment thereof does not contain any detectable NeuGc moieties and/or does not contain any detectable alpha-Gal moieties. In certain embodiments, the HuPTM mAb is a full length or substantially full length mAb with an Fc region.

[0954] In specific embodiments, the anti-TNFα HuPTM mAb or antigen-binding fragment thereof has heavy and light chains with the amino acid sequences of the heavy and light chain Fab portions of infliximab as set forth in FIG. 12B (with glutamine (Q) glycosylation sites; asparaginal (N) glycosylation sites, non-consensus asparaginal (N) glycosylation sites; and tyrosine-O-sulfation sites (Y) are as indicated in the legend) has a glycosylation, particularly a 2,6-sialylation, at one or more of the amino acid positions N57, N101, Q112 and/or N162 of the heavy chain (SEQ ID NO:47) or N41, N76, N158 and/or N210 of the light chain (SEQ ID NO:48). Alternatively or in addition to, the HuPTM mAb or antigen binding-fragment thereof with the heavy and light chain variable domain sequences of infliximab has a sulfation group at Y96 and/or Y97 of the heavy chain (SEQ ID NO:47) and/or Y86 and/or Y87 of the light chain (SEQ ID NO:48). In other embodiments, the anti-TNFα HuPTM mAb or antigen-binding fragment thereof does not contain any detectable NeuGc moieties and/or does not contain any detectable alpha-Gal moieties. In certain embodiments, the HuPTM mAb is a full length or substantially full length mAb with an Fc region.

[0955] In specific embodiments, the anti-TNFα HuPTM mAb or antigen-binding fragment thereof has heavy and light chains with the amino acid sequences of the heavy and light chain Fab portions of golimumab as set forth in FIG. 12C (with glutamine (Q) glycosylation sites; asparaginal (N) glycosylation sites, non-consensus asparaginal (N) glycosylation sites; and tyrosine-O-sulfation sites (Y) are as indicated in the legend) has a glycosylation, particularly a 2,6-sialylation, at one or more of the amino acid positions N80, Q121, and/or N171 of the heavy chain (SEQ ID NO:49) or N162 and/or N214 of the light chain (SEQ ID NO:50). Alternatively or in addition to, the HuPTM mAb or antigen binding-fragment thereof with the heavy and light chain variable domain sequences of golimumab has a sulfation group at Y112, Y113 and/or Y114 of the heavy chain (SEQ ID NO:49) and/or Y89 and/or Y90 of the light chain (SEQ ID NO:50). In other embodiments, the anti-TNFα HuPTM mAb or antigen-binding fragment thereof does not contain any detectable NeuGc moieties and/or does not contain any detectable alpha-Gal moieties. In certain embodiments, the HuPTM mAb is a full length or substantially full length mAb with an Fc region.

[0956] In certain embodiments, the HuPTM mAb or Fab is therapeutically effective and is at least 0.5%, 1% or 2% glycosylated and/or sulfated and may be at least 5%, 10% or even 50% or 100% glycosylated and/or sulfated. The goal of gene therapy treatment provided herein is to slow or arrest the progression of or relieve one or more symptoms of non-infectious uveitis, such as to reduce the levels of pain, redness of the eye, sensitivity to light, and/or other discomfort for the patient. Efficacy may be monitored by measuring a reduction in pain, redness of the eye, and/or photophobia and/or an improvement in vision.

[0957] Combinations of delivery of the anti-TNFα HuPTM mAb or antigen-binding fragment thereof, to the liver or muscles accompanied by delivery of other available treatments are encompassed by the methods provided herein. The additional treatments may be administered before, concurrently, or subsequent to the gene therapy treatment. Available treatments for a subject with non-infectious uveitis that could be combined with the gene therapy provided herein include but are not limited to, azathioprine, methotrexate, mycophenolate mofetil, cyclosporine, cyclophosphamide, corticosteroids (local and/or systemic), and others and administration with anti-TNFα agents, including but not limited to adalimumab, infliximab, or golimumab.

### 5.3.12. Anti-RGMa HuPTM Constructs and Formulations for Multiple Sclerosis

[0958] Compositions and methods are described for the delivery of HuPTM mAbs and antigen-binding fragments thereof, such as HuPTM Fabs, that bind to repulsive guidance molecule-A (RGMa) and indicated for treating multiple sclerosis (MS). In certain embodiments, the HuPTM mAb has the amino acid sequence of elezanumab or an antigen binding fragment of the foregoing. The amino acid sequence of Fab fragments of elezanumab is provided in FIG. 13. Delivery may be accomplished via gene therapy—e.g., by administering a viral vector or other DNA expression construct encoding an RGMa-binding HuPTM mAb (or an antigen binding fragment and/or a hyperglycosylated derivative or other derivative, thereof) to patients (human subjects) diagnosed with, or having one or more symptoms of MS to create a permanent depot that continuously supplies the human PTM, e.g., human-glycosylated, transgene product.

[0959] Transgenes

[0960] Provided are recombinant vectors containing a transgene encoding a HuPTM mAb or HuPTM Fab (or other antigen binding fragment of the HuPTM mAb) that binds to RGMa that can be administered to deliver the HuPTM mAb or antigen binding fragment in a patient. The transgene is a nucleic acid comprising the nucleotide sequences encoding an antigen binding fragment of an antibody that binds to RGMa, such as elezanumab, or variants thereof as detailed herein. The transgene may also encode an RGMa-integrin antigen binding fragment that contains additional glycosylation sites (e.g., see Courtois et al.).

[0961] In certain embodiments, the anti-RGMa antigen-binding fragment transgene comprises the nucleotide sequences encoding the heavy and light chains of the Fab portion of elezanumab (having amino acid sequences of SEQ ID NOs. 51 and 52, respectively, see Table 5 and FIG. 13). The nucleotide sequences may be codon optimized for expression in human cells. Nucleotide sequences may, for example, comprise the nucleotide sequences of SEQ ID NO: 121 (encoding the elezanumab heavy chain Fab portion) and SEQ ID NO: 122 (encoding the elezanumab light chain Fab portion) as set forth in Table 6. The heavy and light chain sequences both have a signal or leader sequence at the N-terminus appropriate for expression and secretion in human cells, in particular, human liver cells (e.g., hepatocytes) or muscle cells. The signal sequence may have the amino acid sequence of MYRMQLLLLIALSLALVTNS (SEQ ID NO: 146). Alternatively, the signal sequence may have an amino acid sequence selected from any one of the signal sequences set forth in Table 3 or 4 that correspond to the proteins secreted by myocytes or hepatocytes, respectively.

[0962] In addition to the heavy and light chain variable domain and C_{H}1 and C_{L} sequences, the transgenes may comprise, at the C-terminus of the heavy chain C_{H}1 domain sequence, all or a portion of the hinge region. In specific embodiments, the anti-integrin-antigen binding domain has a heavy chain Fab domain of SEQ ID NO: 51 with additional hinge region sequence starting after the C-terminal valine (V), contains all or a portion of the amino acid sequence EPKSCDKTHTCPPCPAPEAAGG (SEQ ID NO: 210), and specifically, EPKSCDKTHL (SEQ ID NO: 196), EPKSCDKTHT (SEQ ID NO: 197), EPKSCDKTHTCPPCPA (SEQ ID NO: 198), EPKSCDKTHLCPPCPA (SEQ ID NO: 199), EPKSCDKTHTCPPCPAPEAAGGPSVFL (SEQ ID NO: 212) or EPKSCDKTHLCPPCPAPEAAGGPSVFL (SEQ ID NO: 213) as set forth in FIG. 13. These hinge regions may be encoded by nucleotide sequences at the 3′ end of SEQ ID NO: 121 by the hinge region encoding sequences set forth in Table 6 (SEQ ID NO: 121). In another embodiment, the transgenes comprise the amino acid sequences encoding the full length (or substantially full length) heavy and light chains of the antibody, comprising the Fc domain at the C terminus of the heavy chain, e.g., having an amino acid sequence of SEQ ID NO: 306 (Table 7) or an IgG1 Fc domain, such as SEQ ID No. 283 or as depicted in FIG. 23, or a mutant or variant thereof. The Fc domain may be engineered for altered binding to one or more Fc receptors and/or effector function as disclosed in Section 5.1.9, infra.

[0963] In certain embodiments, the anti-integrin antigen-binding fragment transgene encodes an RGMa antigen-binding fragment comprising a light chain comprising an amino acid sequence that is at least 85%, 86%, 87%, 88%, 89%, 90%, 91%, 92%, 93%, 94%, 95%, 96%, 97%, 98% or 99% identical to the sequence set forth in SEQ ID NO: 52. In certain embodiments, the anti-RGMa antigen-binding fragment transgene encodes an integrin antigen-binding fragment comprising a heavy chain comprising an amino acid sequence that is at least 85%, 86%, 87%, 88%, 89%, 90%, 91%, 92%, 93%, 94%, 95%, 96%, 97%, 98% or 99% identical to the sequence set forth in SEQ ID NO: 51. In certain embodiments, the anti-RGMa antigen-binding fragment transgene encodes an antigen-binding fragment comprising a light chain comprising an amino acid sequence that is at least 85%, 86%, 87%, 88%, 89%, 90%, 91%, 92%, 93%, 94%, 95%, 96%, 97%, 98% or 99% identical to the sequence set forth in SEQ ID NO: 52 and a heavy chain comprising an amino acid sequence that is at least 85%, 86%, 87%, 88%, 89%, 90%, 91%, 92%, 93%, 94%, 95%, 96%, 97%, 98% or 99% identical to the sequence set forth in SEQ ID NO: 51. In specific embodiments, the RGMa antigen binding fragment comprises a heavy chain comprising an amino acid sequence of SEQ ID NO: 51 with 1, 2, 3, 4, 5, 6, 7, 8, 9, 10, 11, 12, 13, 14, 15 or more amino acid substitutions, insertions or deletions, and the substitutions, insertions or deletions are made, for example, in the framework regions (e.g., those regions outside of the CDRs, which CDRs are underlined in FIG. 13) or are substitutions with an amino acid present at that position in the heavy chain of one or more of the other therapeutic antibodies, for example, as identified by the alignment in FIG. 20A. In specific embodiments, the integrin antigen binding fragment comprises a light chain comprising an amino acid sequence of SEQ ID NO: 52 with 1, 2, 3, 4, 5, 6, 7, 8, 9, 10, 11, 12, 13, 14, 15 or more amino acid substitutions, insertions or deletions, and the substitutions, insertions or deletions are made, e.g., in the framework regions (e.g., those regions outside of the CDRs, which CDRs are underlined in FIG. 13) or are substitutions with an amino acid present at that position in the light chain of one or more of the other therapeutic antibodies, for example, as identified by the alignment in FIG. 20B.

[0964] In certain embodiments, the anti-RGMa antigen-binding fragment transgene encodes a hyperglycosylated elezanumab Fab, comprising a heavy chain and a light chain of SEQ ID NOs: 51 and 52, respectively, with one or more of the following mutations: L115N (heavy chain) and/or Q197N (light chain) (see FIGS. 20A (heavy chain) and 20B (light chain)).

[0965] In certain embodiments, the anti-RGMa antigen-binding fragment transgene encodes an antigen-binding fragment and comprises the nucleotide sequences encoding the six elezanumab CDRs which are underlined in the heavy and light chain variable domain sequences of FIG. 13 which are spaced between framework regions, generally human framework regions, and associated with constant domains depending upon the form of the antigen-binding molecule, as is known in the art to form the heavy and/or light chain variable domain of an anti-RGMa antibody or antigen-binding fragment thereof.

[0966] In specific embodiments, provided are AAV vectors comprising a viral capsid that is at least 95% identical to the amino acid sequence of an AAV8 capsid (SEQ ID NO: 72), AAV9 capsid (SEQ ID NO: 73) or AAVrh10 capsid (SEQ ID NO: 74); and an artificial genome comprising an expression cassette flanked by AAV inverted terminal repeats (ITRs), wherein the expression cassette comprises a transgene encoding an anti-RGMa mAb, or an antigen-binding fragment thereof, operably linked to one or more regulatory sequences that control expression of the transgene in human liver or muscle cells.

[0967] Gene Therapy Methods

[0968] Provided are methods of treating human subjects for MS by administration of a viral vector containing a transgene encoding an anti-RGMa antibody, or antigen binding fragment thereof. The antibody may be elenazumab and is, for example, a full length antibody or Fab fragment thereof, or other antigen-binding fragment thereof. In embodiments, the patient has been diagnosed with and/or has symptoms associated with MS. Recombinant vector used for delivering the transgene are described in Section 5.4.1 and 5.4.2. In some embodiments, such vectors should have a tropism for human liver cells and can include non-replicating rAAV, particularly those bearing an AAV8 or AAV9 capsid. The recombinant vectors, such as those shown in FIG. 13, can be administered in any manner such that the recombinant vector enters the liver or muscle tissue, e.g. by introducing the recombinant vector into the bloodstream. See 5.5.2 for details regarding the methods of treatment. In other embodiments, such vectors should have a tropism for human CNS cells and can include non-replicating rAAV, particularly those bearing an AAV9, AAVrh10, AAVrh20, AAVrh39, or AAVcy5 capsid. The recombinant vector, such as shown in FIG. 13, can be administered in any manner such that the recombinant vector enters the CNS, e.g. by introducing the recombinant vector into the cerebral spinal fluid (CSF). See Section 5.5.1 for details regarding the methods of treatment.

[0969] Subjects to whom such gene therapy is administered can be those responsive to anti-RGMa therapy. In certain embodiments, the methods encompass treating patients who have been diagnosed with MS, or have one or more symptoms associated therewith, and identified as responsive to treatment with an anti-RGMa antibody or considered a good candidate for therapy with an anti-RGMa antibody. In specific embodiments, the patients have previously been treated with elezanumab, and have been found to be responsive to elezanumab. To determine responsiveness, the anti-RGMa antibody or antigen-binding fragment transgene product (e.g., produced in cell culture, bioreactors, etc.) may be administered directly to the subject.

[0970] Human Post Translationally Modified Antibodies

[0971] The production of the anti-RGMa HuPTM mAb or HuPTM Fab, should result in a “biobetter” molecule for the treatment of MS accomplished via gene therapy—e.g., by administering a viral vector or other DNA expression construct encoding the anti-RGMa HuPTM Fab, subcutaneously, intramuscularly, or intravenously to human subjects (patients) diagnosed with or having one or more symptoms of MS, to create a permanent depot in the liver, muscle or CNS tissue that continuously supplies the fully-human post-translationally modified, such as human-glycosylated, sulfated transgene product produced by transduced liver, muscle or CNS cells.

[0972] The cDNA construct for the anti-RGMa HuPTMmAb or anti-RGMa HuPTM Fab should include a signal peptide that ensures proper co- and post-translational processing (glycosylation and protein sulfation) by the transduced liver or muscle cells. For example, the signal sequence may be MYRMQLLLLIALSLALVTNS (SEQ ID NO: 146). Alternatively, in some embodiments, the signal sequence may have an amino acid sequence selected from any one of the signal sequences set forth in Tables 2, 3 or 4 that correspond to the proteins secreted by CNS cells, myocytes or hepatocytes, respectively.

[0973] As an alternative, or an additional treatment to gene therapy, the anti-RGMa HuPTM mAb or HuPTM Fab can be produced in human cell lines by recombinant DNA technology, and administered to patients diagnosed with MS, or for whom therapy for MS is considered appropriate.

[0974] In specific embodiments, the anti-RGMa HuPTM mAb or antigen-binding fragment thereof has heavy and light chains with the amino acid sequences of the heavy and light chain Fab portions of elezanumab as set forth in FIG. 13 (with glutamine (Q) glycosylation sites; asparaginal (N) glycosylation sites, non-consensus asparaginal (N) glycosylation sites; and tyrosine-O-sulfation sites (Y) are as indicated in the legend) has a glycosylation, particularly a 2,6-sialylation, at one or more of the amino acid positions N57, Q112, and/or N162 of the heavy chain (SEQ ID NO:51) or N71 and/or N173 of the light chain (SEQ ID NO:52). Alternatively or in addition to, the HuPTM mAb or antigen binding-fragment thereof with the heavy and light chain variable domain sequences of elezanumab has a sulfation group at Y94 and/or Y95 of the heavy chain (SEQ ID NO: 51) and/or Y88 and/or Y89 of the light chain (SEQ ID NO: 52). In other embodiments, the anti-RGMa HuPTM mAb or antigen-binding fragment thereof does not contain detectable NeuGc moieties and/or does not contain detectable alpha-Gal moieties. In certain embodiments, the HuPTM mAb is a full length or substantially full length mAb with an Fc region.

[0975] In certain embodiments, the HuPTM mAb or Fab is therapeutically effective and is at least 0.5%, 1% or 2% glycosylated and/or sulfated and may be at least 5%, 10% or even 50% or 100% glycosylated and/or sulfated. The goal of gene therapy treatment provided herein is to slow or arrest the progression of MS, particularly a reduction in pain and discomfort for the patient and/or improvements in mobility. Efficacy may be monitored by scoring the symptoms or degree of lesions in the affected tissue. For example, with regard to MS, efficacy can be monitored by assessing frequency of relapses (e.g., Annualized Relapse Rate), physical disability status (e.g., scoring Kurtzke Expanded Disability Status Scale (EDSS)), and biological markers, including brain scans using MRI (e.g., evaluation of T1-weighted gadolinium (Gd)-enhancing lesions and T2-hyperintense lesions through magnetic resonance imaging).

[0976] Combinations of delivery of the anti-RGMa HuPTM mAb or antigen-binding fragment thereof, to the CNS, liver, or muscles accompanied by delivery of other available treatments are encompassed by the methods provided herein. The additional treatments may be administered before, concurrently, or subsequent to the gene therapy treatment. Available treatments for MS that could be combined with the gene therapy provided herein include but are not limited to interferon beta, interferon beta 1a, glatiramer acetate, cyclophosphamide, corticosteroids, immunomodulators (e.g, azathioprine, 6-mercaptopurine, and/or methotrexate), and mitoxantrone and administration with anti-RGMa agents, including but not limited to elenazumab.

### 5.3.13 Anti-TTR HuPTM Constructs and Formulations for Amyloidosis

[0977] Compositions and methods are described for the delivery of HuPTM mAbs and antigen-binding fragments thereof, such as HuPTM Fabs, that bind to transthyretin (TTR), particularly mis-folded or pathogenic TTR, indicated for treating familial or wild-type amyloido transthyretin (ATTR) amyloidosis, familial amyloid cardiomyopathy (FAC), and/or familial amyloid polyneuropathy (FAP). In certain embodiments, the HuPTM mAb has the amino acid sequence of NI-301 or PRX-004 or an antigen binding fragment thereof. The amino acid sequence of Fab fragments of NI-301 and PRX-004 are provided in FIGS. 14A and 14B, respectively. Delivery may be accomplished via gene therapy—e.g., by administering a viral vector or other DNA expression construct encoding a TTR-binding HuPTM mAb (or an antigen binding fragment and/or a hyperglycosylated derivative or other derivative, thereof) to patients (human subjects) diagnosed with, or having one or more symptoms of amyloidosis, FAP, and/or FAC to create a permanent depot that continuously supplies the human PTM, e.g., human-glycosylated, transgene product.

[0978] Provided are recombinant vectors containing a transgene encoding a HuPTM mAb or HuPTM Fab (or other antigen binding fragment of the HuPTM mAb) that binds to TTR that can be administered to deliver the HuPTM mAb or antigen binding fragment in a patient. The transgene is a nucleic acid comprising the nucleotide sequences encoding an antigen binding fragment of an antibody that binds to TTR, such as NI-301, PRX-004, or variants thereof as detailed herein. The transgene may also encode an anti-TTR antigen binding fragment that contains additional glycosylation sites (e.g., see Courtois et al.).

[0979] In certain embodiments, the anti-TTR antigen-binding fragment transgene comprises the nucleotide sequences encoding the heavy and light chains of the Fab portion of NI-301 (having amino acid sequences of SEQ ID NOs. 53 and 54, respectively, see Table 5 and FIG. 14A). The nucleotide sequences may be codon optimized for expression in human cells. Nucleotide sequences may, for example, comprise the nucleotide sequences of SEQ ID NO: 123 (encoding the NI-301 heavy chain Fab portion) and SEQ ID NO: 124 (encoding the NI-301 light chain Fab portion) as set forth in Table 6. The heavy and light chain sequences both have a signal or leader sequence at the N-terminus appropriate for expression and secretion in human cells, in particular, human liver cells (e.g., hepatocytes) or muscle cells. The signal sequence may have the amino acid sequence of MYRMQLLLLIALSLALVTNS (SEQ ID NO: 146). Alternatively, the signal sequence may have an amino acid sequence selected from any one of the signal sequences set forth in Table 3 or 4 that correspond to the proteins secreted by myocytes or hepatocytes, respectively.

[0980] In addition to the heavy and light chain variable domain and C_{H}1 and C_{L} domain sequences, the transgenes may comprise, at the C-terminus of the heavy chain C_{H}1 domain sequence, all or a portion of the hinge region. In specific embodiments, the anti-TTR antigen binding domain has a heavy chain Fab domain of SEQ ID NO: 53 with additional hinge region sequence starting after the C-terminal valine (V), contains all or a portion of the amino acid sequence EPKSCDKTHTCPPCPAPELLGG (SEQ ID NO: 194), and specifically, EPKSCDKTHL (SEQ ID NO: 196), EPKSCDKTHT (SEQ ID NO: 197), EPKSCDKTHTCPPCPA (SEQ ID NO: 198), EPKSCDKTHLCPPCPA (SEQ ID NO: 199), EPKSCDKTHTCPPCPAPELLGGPSVFL (SEQ ID NO: 200) or EPKSCDKTHLCPPCPAPELLGGPSVFL (SEQ ID NO: 201) as set forth in FIG. 14A. These hinge regions may be encoded by nucleotide sequences at the 3′ end of SEQ ID NO: 123 by the hinge region encoding sequences set forth in Table 6 (SEQ ID NO: 123). In another embodiment, the transgenes comprise the amino acid sequences encoding the full length (or substantially full length) heavy and light chains of the antibody, comprising the Fc domain at the C terminus of the heavy chain, e.g., an IgG1 Fc domain, such as SEQ ID No. 283 or as depicted in FIG. 23, or a mutant or variant thereof. The Fc domain may be engineered for altered binding to one or more Fc receptors and/or effector function as disclosed in Section 5.1.9, infra.

[0981] In certain embodiments, the anti-TTR antigen-binding fragment transgene encodes an TTR antigen-binding fragment comprising a light chain comprising an amino acid sequence that is at least 85%, 86%, 87%, 88%, 89%, 90%, 91%, 92%, 93%, 94%, 95%, 96%, 97%, 98% or 99% identical to the sequence set forth in SEQ ID NO: 54. In certain embodiments, the anti-TTR antigen-binding fragment transgene encodes an TTR antigen-binding fragment comprising a heavy chain comprising an amino acid sequence that is at least 85%, 86%, 87%, 88%, 89%, 90%, 91%, 92%, 93%, 94%, 95%, 96%, 97%, 98% or 99% identical to the sequence set forth in SEQ ID NO: 53. In certain embodiments, the anti-TTR antigen-binding fragment transgene encodes an antigen-binding fragment comprising a light chain comprising an amino acid sequence that is at least 85%, 86%, 87%, 88%, 89%, 90%, 91%, 92%, 93%, 94%, 95%, 96%, 97%, 98% or 99% identical to the sequence set forth in SEQ ID NO: 54 and a heavy chain comprising an amino acid sequence that is at least 85%, 86%, 87%, 88%, 89%, 90%, 91%, 92%, 93%, 94%, 95%, 96%, 97%, 98% or 99% identical to the sequence set forth in SEQ ID NO: 53. In specific embodiments, the TTR antigen binding fragment comprises a heavy chain comprising an amino acid sequence of SEQ ID NO: 53 with 1, 2, 3, 4, 5, 6, 7, 8, 9, 10, 11, 12, 13, 14, 15 or more amino acid substitutions, insertions or deletions, and the substitutions, insertions or deletions are made, for example, in the framework regions (e.g., those regions outside of the CDRs, which CDRs are underlined in FIG. 14A) or are substitutions with an amino acid present at that position in the heavy chain of one or more of the other therapeutic antibodies, for example, as identified by the alignment in FIG. 20A. In specific embodiments, the TTR antigen binding fragment comprises a light chain comprising an amino acid sequence of SEQ ID NO: 54 with 1, 2, 3, 4, 5, 6, 7, 8, 9, 10, 11, 12, 13, 14, 15 or more amino acid substitutions, insertions or deletions, and the substitutions, insertions or deletions are made, e.g., in the framework regions (e.g., those regions outside of the CDRs, which CDRs are underlined in FIG. 14A) or are substitutions with an amino acid present at that position in the light chain of one or more of the other therapeutic antibodies, for example, as identified by the alignment in FIG. 20B.

[0982] In certain embodiments, the anti-TTR antigen-binding fragment transgene encodes a hyperglycosylated NI-301 Fab, comprising a heavy chain and a light chain of SEQ ID NOs: 53 and 54, respectively, with one or more of the following mutations: M115N (heavy chain), Q159N or Q159S (light chain), and/or E194N (light chain) (see FIGS. 20A (heavy chain) and 20B (light chain)).

[0983] In certain embodiments, the anti-TTR antigen-binding fragment transgene encodes an antigen-binding fragment and comprises the nucleotide sequences encoding the six NI-301 CDRs which are underlined in the heavy and light chain variable domain sequences of FIG. 14A which are spaced between framework regions, generally human framework regions, and associated with constant domains depending upon the form of the antigen-binding molecule, as is known in the art to form the heavy and/or light chain variable domain of an anti-TTR antibody or antigen-binding fragment thereof.

[0984] In certain embodiments, the anti-TTR antigen-binding fragment transgene comprises the nucleotide sequences encoding the heavy and light chains of the Fab portion of PRX-004 (having amino acid sequences of SEQ ID NOs. 55 and 56, respectively, see Table 5 and FIG. 14B). The nucleotide sequences may be codon optimized for expression in human cells. Nucleotide sequences may, for example, comprise the nucleotide sequences of SEQ ID NO: 125 (encoding the PRX-004 heavy chain Fab portion) and SEQ ID NO: 126 (encoding the PRX-004 light chain Fab portion) as set forth in Table 6. The heavy and light chain sequences both have a signal or leader sequence at the N-terminus appropriate for expression and secretion in human cells, in particular, human liver cells (e.g., hepatocytes) or muscle cells. The signal sequence may have the amino acid sequence of MYRMQLLLLIALSLALVTNS (SEQ ID NO: 146). Alternatively, the signal sequence may have an amino acid sequence selected from any one of the signal sequences set forth in Table 3 or 4 that correspond to the proteins secreted by myocytes or hepatocytes, respectively.

[0985] In addition to the heavy and light chain variable domain and C_{H}1 and C_{L} domain sequences, the transgenes may comprise, at the C-terminus of the heavy chain C_{H}1 domain sequence, all or a portion of the hinge region. In specific embodiments, the anti-TTR antigen binding domain has a heavy chain Fab domain of SEQ ID NO: 55 with additional hinge region sequence starting after the C-terminal valine (V), contains all or a portion of the amino acid sequence EPKSCDKTHTCPPCPAPELLGG (SEQ ID NO: 194), and specifically, EPKSCDKTHL (SEQ ID NO: 196), EPKSCDKTHT (SEQ ID NO: 197), EPKSCDKTHTCPPCPA (SEQ ID NO: 198), EPKSCDKTHLCPPCPA (SEQ ID NO: 199), EPKSCDKTHTCPPCPAPELLGGPSVFL (SEQ ID NO: 200) or EPKSCDKTHLCPPCPAPELLGGPSVFL (SEQ ID NO: 201) as set forth in FIG. 14B. These hinge regions may be encoded by nucleotide sequences at the 3′ end of SEQ ID NO: 125 by the hinge region encoding sequences set forth in Table 6 (SEQ ID NO: 125). In another embodiment, the transgenes comprise the amino acid sequences encoding the full length (or substantially full length) heavy and light chains of the antibody, comprising the Fc domain at the C terminus of the heavy chain, e.g., having an amino acid sequence of SEQ ID NO: 307 (Table 7) or an IgG1 Fc domain, such as SEQ ID No. 283 or as depicted in FIG. 23, or a mutant or variant thereof. The Fc domain may be engineered for altered binding to one or more Fc receptors and/or effector function as disclosed in Section 5.1.9, infra.

[0986] In certain embodiments, the anti-TTR antigen-binding fragment transgene encodes an TTR antigen-binding fragment comprising a light chain comprising an amino acid sequence that is at least 85%, 86%, 87%, 88%, 89%, 90%, 91%, 92%, 93%, 94%, 95%, 96%, 97%, 98% or 99% identical to the sequence set forth in SEQ ID NO: 56. In certain embodiments, the anti-TTR antigen-binding fragment transgene encodes an TTR antigen-binding fragment comprising a heavy chain comprising an amino acid sequence that is at least 85%, 86%, 87%, 88%, 89%, 90%, 91%, 92%, 93%, 94%, 95%, 96%, 97%, 98% or 99% identical to the sequence set forth in SEQ ID NO: 55. In certain embodiments, the anti-TTR antigen-binding fragment transgene encodes an antigen-binding fragment comprising a light chain comprising an amino acid sequence that is at least 85%, 86%, 87%, 88%, 89%, 90%, 91%, 92%, 93%, 94%, 95%, 96%, 97%, 98% or 99% identical to the sequence set forth in SEQ ID NO: 56 and a heavy chain comprising an amino acid sequence that is at least 85%, 86%, 87%, 88%, 89%, 90%, 91%, 92%, 93%, 94%, 95%, 96%, 97%, 98% or 99% identical to the sequence set forth in SEQ ID NO: 55. In specific embodiments, the TTR antigen binding fragment comprises a heavy chain comprising an amino acid sequence of SEQ ID NO: 55 with 1, 2, 3, 4, 5, 6, 7, 8, 9, 10, 11, 12, 13, 14, 15 or more amino acid substitutions, insertions or deletions, and the substitutions, insertions or deletions are made, e.g., in the framework regions (e.g., those regions outside of the CDRs, which CDRs are underlined in FIG. 14B) or are substitutions with an amino acid present at that position in the heavy chain of one or more of the other therapeutic antibodies, for example, as identified by the alignment in FIG. 20A. In specific embodiments, the TTR antigen binding fragment comprises a light chain comprising an amino acid sequence of SEQ ID NO: 56 with 1, 2, 3, 4, 5, 6, 7, 8, 9, 10, 11, 12, 13, 14, 15 or more amino acid substitutions, insertions or deletions, and the substitutions, insertions or deletions are made, e.g., in the framework regions (e.g., those regions outside of the CDRs, which CDRs are underlined in FIG. 14B) or are substitutions with an amino acid present at that position in the light chain of one or more of the other therapeutic antibodies, for example, as identified by the alignment in FIG. 20B.

[0987] In certain embodiments, the anti-TTR antigen-binding fragment transgene encodes a hyperglycosylated PRX-004 Fab, comprising a heavy chain and a light chain of SEQ ID NOs: 55 and 56, respectively, with one or more of the following mutations: L112N (heavy chain), Q160N or Q160S (light chain), and/or E195N (light chain) (see FIGS. 20A (heavy chain) and 20B (light chain)).

[0988] In certain embodiments, the anti-TTR antigen-binding fragment transgene encodes an antigen-binding fragment and comprises the nucleotide sequences encoding the six PRX-004 CDRs which are underlined in the heavy and light chain variable domain sequences of FIG. 14B which are spaced between framework regions, generally human framework regions, and associated with constant domains depending upon the form of the antigen-binding molecule, as is known in the art to form the heavy and/or light chain variable domain of an anti-TTR antibody or antigen-binding fragment thereof.

[0989] Gene Therapy Methods

[0990] Provided are methods of treating human subjects for ATTR, FAT, or FAC by administration of a viral vector containing a transgene encoding an anti-TTR antibody or antigen binding fragment thereof. The antibody may be NI-301, PRX-004 and is, e.g., a full length antibody or Fab fragment thereof, or other antigen-binding fragment thereof. In embodiments, the patient has been diagnosed with and/or has symptoms associated with ATTR, FAC, or FAT.

[0991] Provided are methods of treating human subjects for ATTR, FAC, and FAT by administration of a viral vector containing a transgene encoding an anti-TTR antibody, or antigen binding fragment thereof. The antibody may be NI-301, or PRX-004, and is, e.g., a Fab fragment thereof, or other antigen-binding fragment thereof. In embodiments, the patient has been diagnosed with and/or has symptoms associated with ATTR, FAT, or FAC. Recombinant vector used for delivering the transgene are described in Section 5.4.1 and 5.4.2. In some embodiments, such vectors should have a tropism for human liver cells and can include non-replicating rAAV, particularly those bearing an AAV8 or AAV9 capsid. The recombinant vectors, such as those shown in FIGS. 14A and 14B, can be administered in any manner such that the recombinant vector enters the liver or muscle tissue, e.g., by introducing the recombinant vector into the bloodstream. See 5.5.2 for details regarding the methods of treatment. In other embodiments, such vectors should have a tropism for human CNS cells and can include non-replicating rAAV, particularly those bearing an AAV9, AAVrh10, AAVrh20, AAVrh39, or AAVcy5 capsid. The recombinant vector, such as shown in FIGS. 14A and 14B, can be administered in any manner such that the recombinant vector enters the CNS, e.g., by introducing the recombinant vector into the cerebral spinal fluid (CSF). See Section 5.5.1 for details regarding the methods of treatment.

[0992] Subjects to whom such gene therapy is administered can be those responsive to anti-TTR therapy. In certain embodiments, the methods encompass treating patients who have been diagnosed with ATTR, FAP, or FAC, or have one or more symptoms associated therewith, and identified as responsive to treatment with an anti-TTR antibody, or considered a good candidate for therapy with an anti-TTR antibody. In specific embodiments, the patients have previously been treated with PRX-004 or NI-301, and have been found to be responsive to PRX-004 or NI-301. To determine responsiveness, the anti-TTR or antigen-binding fragment transgene product (e.g., produced in cell culture, bioreactors, etc.) may be administered directly to the subject.

[0993] Human Post Translationally Modified Antibodies

[0994] The production of the anti-TTR HuPTM mAb or HuPTM Fab, should result in a “biobetter” molecule for the treatment of ATTR, FAC, or FAP accomplished via gene therapy—e.g., by administering a viral vector or other DNA expression construct encoding the anti-TTR HuPTM Fab, subcutaneously, intramuscularly, or intravenously to human subjects (patients) diagnosed with ATTR, FAC, or FAP, to create a permanent depot in the muscle or liver that continuously supplies the fully-human post-translationally modified, e.g., human-glycosylated, sulfated transgene product produced by transduced cells of the muscle or liver.

[0995] The cDNA construct for the anti-TTR HuPTMmAb or anti-TTR HuPTM Fab should include a signal peptide that ensures proper co- and post-translational processing (glycosylation and protein sulfation) by the transduced cells of the muscle or liver. For example, the signal sequence may be MYRMQLLLLIALSLALVTNS (SEQ ID NO: 146). Alternatively, the signal sequence may have an amino acid sequence selected from any one of the signal sequences set forth in Table 3 or 4 that correspond to the proteins secreted by cells of the muscle or liver, respectively.

[0996] As an alternative, or an additional treatment to gene therapy, the anti-TTR HuPTM mAb or HuPTM Fab can be produced in human cell lines by recombinant DNA technology, and administered to patients diagnosed with ATTR, FAP, or FAC is considered appropriate.

[0997] In specific embodiments, the anti-TTR HuPTM mAb or antigen-binding fragment thereof has heavy and light chains with the amino acid sequences of the heavy and light chain Fab portions of NI-301 as set forth in FIG. 14A (with glutamine (Q) glycosylation sites; asparaginal (N) glycosylation sites, non-consensus asparaginal (N) glycosylation sites; and tyrosine-O-sulfation sites (Y) are as indicated in the legend) has a glycosylation, particularly a 2,6-sialylation, at one or more of the amino acid positions N58, N78, N83, Q112, and/or N161 of the heavy chain (SEQ ID NO: 53) or Q99, N157, and/or N209 of the light chain (SEQ ID NO: 54). Alternatively or in addition to, the HuPTM mAb or antigen binding-fragment thereof with the heavy and light chain variable domain sequences of NI-301 has a sulfation group at Y95 and/or Y96 of the heavy chain (SEQ ID NO: 53) and/or Y85 and/or Y86 of the light chain (SEQ ID NO: 54). In other embodiments, the anti-TTR HuPTM mAb or antigen-binding fragment thereof does not contain detectable NeuGc moieties and/or does not contain detectable alpha-Gal moieties. In certain embodiments, the HuPTM mAb is a full length or substantially full length mAb with an Fc region.

[0998] In specific embodiments, the anti-TTR HuPTM mAb or antigen-binding fragment thereof has heavy and light chains with the amino acid sequences of the heavy and light chain Fab portions of PRX-004 as set forth in FIG. 14B (with glutamine (Q) glycosylation sites; asparaginal (N) glycosylation sites, non-consensus asparaginal (N) glycosylation sites; and tyrosine-O-sulfation sites (Y) are as indicated in the legend) has a glycosylation, particularly a 2,6-sialylation, at one or more of the amino acid positions N76, Q109, and/or N159 of the heavy chain (SEQ ID NO: 55) or N158 and/or N210 of the light chain (SEQ ID NO: 56). Alternatively or in addition to, the HuPTM mAb or antigen binding-fragment thereof with the heavy and light chain variable domain sequences of PRX-004 has a sulfation group at Y93 and/or Y94 of the heavy chain (SEQ ID NO: 55) and/or Y86 and/or Y87 of the light chain (SEQ ID NO: 56). In other embodiments, the anti-TTR HuPTM mAb or antigen-binding fragment thereof does not contain detectable NeuGc moieties and/or does not contain detectable alpha-Gal moieties. In certain embodiments, the HuPTM mAb is a full length or substantially full length mAb with an Fc region.

[0999] In certain embodiments, the HuPTM mAb or Fab is therapeutically effective and is at least 0.5%, 1% or 2% glycosylated and/or sulfated and may be at least 5%, 10% or even 50% or 100% glycosylated and/or sulfated. The goal of gene therapy treatment provided herein is to slow or arrest the progression of the disease being treated or alleviate one or more symptoms thereof. In the case of ATTR, efficacy can be monitored by assessing one or more amyloidosis endpoints, including by measuring the progression of organ damage, the amount of amyloid fibril tissue deposits, and/or improvement in organ function (i.e. kidney and liver).

[1000] Combinations of delivery of the anti-TTR HuPTM mAb or antigen-binding fragment thereof to the muscle or liver accompanied by delivery of other available treatments are encompassed by the methods provided herein. The additional treatments may be administered before, concurrently, or subsequent to the gene therapy treatment. Available treatments for ATTR that could be combined with the gene therapy provided herein include but are not limited to chemotherapeutic agent(s) (e.g., alkylating agents, antimetabolites, topoisomerase inhibitors, and mitotic inhibitors), lenalidomide (REVLIMID®), pomalidomide (POMALYST®), thalidomide (SYNOVIR®), daraumumab (DARZALEX®), elotuzumab (EMPLICITI®), bortezomib (VELCADE®), ixazomib (NINLARO®), and/or carfilzomib (KYPROLIS®) and administration with anti-TTR agents, including but not limited to NI-301 and PRX-004.

### 5.3.14 Anti-CTGF HuPTM Constructs and Formulations for Fibrotic Diseases

[1001] Compositions and methods are described for the delivery of HuPTM mAbs and antigen-binding fragments thereof, such as HuPTM Fabs, that bind to connective tissue growth factor (CTGF) indicated for treating one or more fibrotic disorders including pulmonary fibrosis, cystic fibrosis (CF), idiopathic pulmonary fibrosis (IPF), liver cirrhosis, atrial fibrosis, endomyocardial fibrosis, old myocardial infarction, arthrofibrosis, Crohn's disease, mediastinal fibrosis, myelofibrosis (MF), nephrogenic systemic fibrosis (NSF), progressive massive fibrosis (PMF), retroperitoneal fibrosis (RPF). In certain embodiments, the HuPTM mAb has the amino acid sequence of pamrevlumab or an antigen binding fragment thereof. The amino acid sequence of Fab fragments of pamrevlumab is provided in FIG. 15. Delivery may be accomplished via gene therapy—e.g., by administering a viral vector or other DNA expression construct encoding an CTGF-binding HuPTM mAb (or an antigen binding fragment and/or a hyperglycosylated derivative or other derivative, thereof) to patients (human subjects) diagnosed with, or having one or more symptoms of a fibrotic disorder to create a permanent depot that continuously supplies the human PTM, e.g., human-glycosylated, transgene product.

[1002] Transgenes

[1003] Provided are recombinant vectors containing a transgene encoding a HuPTM mAb or HuPTM Fab (or other antigen binding fragment of the HuPTM mAb) that binds to CTGF that can be administered to deliver the HuPTM mAb or antigen binding fragment in a patient. The transgene is a nucleic acid comprising the nucleotide sequences encoding an antigen binding fragment of an antibody that binds to CTGF, such as pamrevlumab, or variants thereof as detailed herein. The transgene may also encode an anti-CTGF antigen binding fragment that contains additional glycosylation sites (e.g., see Courtois et al.).

[1004] In certain embodiments, the anti-CTGF antigen-binding fragment transgene comprises the nucleotide sequences encoding the heavy and light chains of the Fab portion of pamrevlumab (having amino acid sequences of SEQ ID NOs. 57 and 58, respectively, see Table 5 and FIG. 15). The nucleotide sequences may be codon optimized for expression in human cells Nucleotide sequences may, for example, comprise the nucleotide sequences of SEQ ID NO: 127 (encoding the pamrevlumab heavy chain Fab portion) and SEQ ID NO: 128 (encoding the pamrevlumab light chain Fab portion) as set forth in Table 6. In the case of treating fibrotic diseases, the heavy and light chain sequences both have a signal or leader sequence at the N-terminus appropriate for expression and secretion in human cells, in particular, human liver cells (e.g., hepatocytes) or muscle cells. The signal sequence may have the amino acid sequence of MYRMQLLLLIALSLALVTNS (SEQ ID NO: 146). Alternatively, the signal sequence may have an amino acid sequence selected from any one of the signal sequences set forth in Table 3 or 4 that correspond to the proteins secreted by myocytes or hepatocytes, respectively.

[1005] In addition to the heavy and light chain variable domain and C_{H}1 and C_{L} domain sequences, the transgenes may comprise, at the C-terminus of the heavy chain C_{H}1 domain sequence, all or a portion of the hinge region. In specific embodiments, the anti-CTGF antigen binding domain has a heavy chain Fab domain of SEQ ID NO: 57 with additional hinge region sequence starting after the C-terminal valine (V), contains all or a portion of the amino acid sequence EPKSCDKTHTCPPCPAPEAAGG (SEQ ID NO: 210), and specifically, EPKSCDKTHL (SEQ ID NO: 196), EPKSCDKTHT (SEQ ID NO: 197), EPKSCDKTHTCPPCPA (SEQ ID NO: 198), EPKSCDKTHLCPPCPA (SEQ ID NO: 199), EPKSCDKTHTCPPCPAPEAAGGPSVFL (SEQ ID NO: 212) or EPKSCDKTHLCPPCPAPEAAGGPSVFL (SEQ ID NO: 213) as set forth in FIG. 15. These hinge regions may be encoded by nucleotide sequences at the 3′ end of SEQ ID NO: 127 by the hinge region encoding sequences set forth in Table 6 (SEQ ID NO: 127). In another embodiment, the transgenes comprise the amino acid sequences encoding the full length (or substantially full length) heavy and light chains of the antibody, comprising the Fc domain at the C terminus of the heavy chain, e.g. having an amino acid sequence of SEQ ID NO: 308 (Table 7) or an IgG1 Fc domain, such as SEQ ID No. 283 or as depicted in FIG. 23, or a mutant or variant thereof. The Fc domain may be engineered for altered binding to one or more Fc receptors and/or effector function as disclosed in Section 5.1.9, infra.

[1006] In certain embodiments, the anti-CTGF antigen-binding fragment transgene encodes an CTGF antigen-binding fragment comprising a light chain comprising an amino acid sequence that is at least 85%, 86%, 87%, 88%, 89%, 90%, 91%, 92%, 93%, 94%, 95%, 96%, 97%, 98% or 99% identical to the sequence set forth in SEQ ID NO: 58. In certain embodiments, the anti-CTGF antigen-binding fragment transgene encodes an CTGF antigen-binding fragment comprising a heavy chain comprising an amino acid sequence that is at least 85%, 86%, 87%, 88%, 89%, 90%, 91%, 92%, 93%, 94%, 95%, 96%, 97%, 98% or 99% identical to the sequence set forth in SEQ ID NO: 57. In certain embodiments, the anti-CTGF antigen-binding fragment transgene encodes an antigen-binding fragment comprising a light chain comprising an amino acid sequence that is at least 85%, 86%, 87%, 88%, 89%, 90%, 91%, 92%, 93%, 94%, 95%, 96%, 97%, 98% or 99% identical to the sequence set forth in SEQ ID NO: 58 and a heavy chain comprising an amino acid sequence that is at least 85%, 86%, 87%, 88%, 89%, 90%, 91%, 92%, 93%, 94%, 95%, 96%, 97%, 98% or 99% identical to the sequence set forth in SEQ ID NO: 57. In specific embodiments, the CTGF antigen binding fragment comprises a heavy chain comprising an amino acid sequence of SEQ ID NO: 57 with 1, 2, 3, 4, 5, 6, 7, 8, 9, 10, 11, 12, 13, 14, 15 or more amino acid substitutions, insertions or deletions, and the substitutions, insertions or deletions are made, e.g., in the framework regions (e.g., those regions outside of the CDRs, which CDRs are underlined in FIG. 15) or are substitutions with an amino acid present at that position in the heavy chain of one or more of the other therapeutic antibodies, for example, as identified by the alignment in FIG. 20A. In specific embodiments, the CTGF antigen binding fragment comprises a light chain comprising an amino acid sequence of SEQ ID NO: 58 with 1, 2, 3, 4, 5, 6, 7, 8, 9, 10, 11, 12, 13, 14, 15 or more amino acid substitutions, insertions or deletions, and the substitutions, insertions or deletions are made, e.g., in the framework regions (e.g., those regions outside of the CDRs, which CDRs are underlined in FIG. 15) or are substitutions with an amino acid present at that position in the light chain of one or more of the other therapeutic antibodies, for example, as identified by the alignment in FIG. 20B.

[1007] In certain embodiments, the anti-CTGF antigen-binding fragment transgene encodes a hyperglycosylated pamrevlumab Fab, comprising a heavy chain and a light chain of SEQ ID NOs: 57 and 58, respectively, with one or more of the following mutations: L111N (heavy chain) and/or Q196N (light chain) (see FIGS. 20A (heavy chain) and 20B (light chain)).

[1008] In certain embodiments, the anti-CTGF antigen-binding fragment transgene encodes an antigen-binding fragment and comprises the nucleotide sequences encoding the six pamrevlumab CDRs which are underlined in the heavy and light chain variable domain sequences of FIG. 15 which are spaced between framework regions, generally human framework regions, and associated with constant domains depending upon the form of the antigen-binding molecule, as is known in the art to form the heavy and/or light chain variable domain of an anti-CTGF antibody or antigen-binding fragment thereof.

[1009] Gene Therapy Methods

[1010] Provided are methods of treating human subjects for one or more fibrotic disorders (such as IPF) by administration of a viral vector containing a transgene encoding an anti-CTGF antibody or antigen binding fragment thereof. The antibody may be pamrevlumab, and is e.g. a full length or substantially full length antibody or Fab fragment thereof, or other antigen-binding fragment thereof. In embodiments, the patient has been diagnosed with and/or has symptoms associated with one or more fibrotic disorders.

[1011] Recombinant vector used for delivering the transgene are described in Section 5.4.3. For delivery to the liver, recombinant vector used for delivering the transgene are described in Section 5.4.2. Such vectors should have a tropism for human liver cells and can include non-replicating rAAV, particularly those bearing an AAV8 or AAV9 capsid. The recombinant vectors, such as those shown in FIG. 15, can be administered in any manner such that the recombinant vector enters the liver, e.g. by introducing the recombinant vector into the bloodstream. See Section 5.5.2 for details regarding the methods of treatment.

[1012] Subjects to whom such gene therapy is administered can be those responsive to anti-CTGF therapy. In certain embodiments, the methods encompass treating patients who have been diagnosed with one or more fibrotic disorders, or have one or more symptoms associated therewith, and identified as responsive to treatment with an anti-CTGF antibody or considered a good candidate for therapy with an anti-CTGF antibody. In specific embodiments, the patients have previously been treated with pamrevlumab, and have been found to be responsive to pamrevlumab. To determine responsiveness, the anti-CTGF or antigen-binding fragment transgene product (e.g., produced in cell culture, bioreactors, etc.) may be administered directly to the subject.

### Human Post Translationally Modified Antibodies

[1013] The production of the anti-CTGF HuPTM mAb or HuPTM Fab, should result in a “biobetter” molecule for the treatment of one or more fibrotic disorders accomplished via gene therapy—e.g., by administering a viral vector or other DNA expression construct encoding the anti-CTGF HuPTM Fab, subcutaneously, intramuscularly, or intravenously to human subjects (patients) diagnosed with one or more fibrotic disorders, to create a permanent depot in the liver or muscle that continuously supplies the fully-human post-translationally modified, e.g., human-glycosylated, sulfated transgene product produced by transduced cells of the liver or muscle.

[1014] The cDNA construct for the anti-CTGF HuPTMmAb or anti-CTGF HuPTM Fab should include a signal peptide that ensures proper co- and post-translational processing (glycosylation and protein sulfation) by the transduced cells of the muscle or liver. For example, the signal sequence may be MYRMQLLLLIALSLALVTNS (SEQ ID NO: 146). Alternatively, the signal sequence may have an amino acid sequence selected from any one of the signal sequences set forth in Table 3 or 4 that correspond to the proteins secreted by cells of the muscle or liver, respectively.

[1015] As an alternative, or an additional treatment to gene therapy, the anti-CTGF HuPTM mAb or HuPTM Fab can be produced in human cell lines by recombinant DNA technology and administered to patients diagnosed with a fibrotic disorder for whom therapy for a fibrotic disorder is considered appropriate.

[1016] In specific embodiments, the anti-CTGF HuPTM mAb or antigen-binding fragment thereof has heavy and light chains with the amino acid sequences of the heavy and light chain Fab portions of pamrevlumab as set forth in FIG. 15 (with glutamine (Q) glycosylation sites; asparaginal (N) glycosylation sites, non-consensus asparaginal (N) glycosylation sites; and tyrosine-O-sulfation sites (Y) are as indicated in the legend) has a glycosylation, particularly a 2,6-sialylation, at one or more of the amino acid positions N59, Q108, and/or N158 of the heavy chain (SEQ ID NO:57) or N68, N95, and/or N172 of the light chain (SEQ ID NO:58). Alternatively or in addition to, the HuPTM mAb or antigen binding-fragment thereof with the heavy and light chain variable domain sequences of pamrevlumab has a sulfation group at Y94 and/or Y95 of the heavy chain (SEQ ID NO: 57) and/or Y30, Y85 and/or Y86 of the light chain (SEQ ID NO: 58). In other embodiments, the anti-CTGF HuPTM mAb or antigen-binding fragment thereof does not contain detectable NeuGc moieties and/or does not contain detectable alpha-Gal moieties. In certain embodiments, the HuPTM mAb is a full length or substantially full length mAb with an Fc region.

[1017] In certain embodiments, the HuPTM mAb or Fab is therapeutically effective and is at least 0.5%, 1% or 2% glycosylated and/or sulfated and may be at least 5%, 10% or even 50% or 100% glycosylated and/or sulfated. The goal of gene therapy treatment provided herein is to slow or arrest the progression of the disease being treated or alleviate one or more symptoms thereof. In the case of CF, efficacy can be monitored by assessing Forced Expiratory Volume in is (FEV1), decreased frequency of pulmonary exacerbations, quality of life (QoL) improvement, and, for younger patients, growth improvement. (e.g., see VanDevanter and Konstan, “Outcome measurement for clinical trials assessing treatment of cystic fibrosis lung disease,” Clin. Investig. 2(2):163-175 (2012)). In the case of pulmonary fibrosis, efficacy can be monitored by assessing the lung vital capacity (LVC), desaturation with exertion, and diffusing capacity of the lungs for carbon monoxide (DLCO). In the case of IPF, efficacy may be monitored by assessing the level of dyspnoea, FVC, DLCO, desaturation during the 6-min walk test, extent of honeycombing on high-resolution computed tomography (HRCT), or presence of pulmonary hypertension or emphysema. In the case of liver cirrhosis, efficacy may be monitored by assessing the hepatic venous pressure gradient (HVPG) and the stage of liver fibrosis. In the case of atrial fibrosis, efficacy may be monitored by localizing and quantifying the degree of structural remodeling (SRM) and/or fibrosis in the atrium using contrast-media enhanced delayed enhancement MRI (DE-MRI). In the case of endomyocardial fibrosis, efficacy may be monitored by assessing fibrotic lesions of the inner lining of the heart cavities. In the case of arthrofibrosis, efficacy may be monitored by assessing the extent of involvement by fibrosis in the affected joint (e.g., MRI). In the case of Crohn's disease, efficacy may be monitored by assessing the level of serological markers (e.g., fibronectin, CRP, bFGF, ASCA) and/or the degree of fibrotic lesions using advanced imaging technologies. In the case of mediastinal fibrosis, efficacy may be monitored by assessing the presence and/or degree of fibrosis, polymorphic inflammatory infiltrates and phlebitis by using contrast-enhanced CT. In the case of myelofibrosis, efficacy may be monitored by assessing changes in the level of inflammatory cytokine in the serum, blood counts (PLT, WBC, RBC), degree of fibrosis (reticulin and collagen) in the bone marrow, spleen size, and/or constitutional symptoms compared to baseline. In the case of nephrogenic systemic fibrosis, efficacy may be monitored by assessing changes in the glomerular filtration rate (GFR) from baseline, quantification of fibrotic and/or darkened of the skin, and/or reduction in burning, itching and/or severe sharp pains in areas of involvement. In the case of progressive massive fibrosis, efficacy may be monitored by improvement of pulmonary function and/or reduction in the size of conglomerate masses of dense fibrosis in the lungs. In the case of retroperitoneal fibrosis, the efficacy may be monitored by assessing decreased pain in the lower back and/or abdomen, improvement of anemia, abnormal discoloration of the skin, and/or quality of life.

[1018] Combinations of delivery of the anti-CTGF HuPTM mAb or antigen-binding fragment thereof to the muscle or liver accompanied by delivery of other available treatments are encompassed by the methods provided herein. The additional treatments may be administered before, concurrently, or subsequent to the gene therapy treatment. Available treatments for CF that could be combined with the gene therapy provided herein include but are not limited to antibiotics, vaccines, and cough medicines (e.g., acetylcysteine and dornasa alfa) and administration with anti-CTGF, including but not limited to pamrevlumab. Available treatments for IPF that could be combined with the gene therapy provided herein include but are not limited to oxygen therapy, pulmonary rehabilitation, Nintedanib (OFEV®), Pirfenidone (ESBRIET®, PIRFENEX®, PIRESPA®), Corticosteroids (prednisone), Mycophenolate mofetil/mycophenolic acid (CELLCEPT®), and Azathioprine (IMURAN®) and administration with anti-CTGF, including but not limited to pamrevlumab. Available treatments for cirrhosis that could be combined with gene therapy provided herein include but are not limited to diuretics (e.g., spironolactone, metolazone, and frusemide), ammonia reducer, beta blocker, synthetic hormones (e.g., octeotride), antibiotics, and antiviral drugs. Available treatments for atrial fibrosis that could be combined with gene therapy provided herein include but are not limited to physical ablation, beta blockers, blood thinners, calcium channel blockers, corticosteroids (e.g., prednisone), non-steroidal anti-inflammatory drugs, and antiarrhythmics (digoxin). Available treatments for endomyocardial fibrosis that could be combined with gene therapy provided herein include but are not limited to surgery, blood thinners, ACE inhibitors, corticosteroids (e.g., prednisone), non-steroidal anti-inflammatory drugs, diuretics (e.g., spironolactone, metolazone, and frusemide) or other anti-inflammatories, and antiarrhythmics (digoxin). Available treatments for old myocardial infarction that could be combined with gene therapy provided herein include but are not limited to beta blockers, blood thinners, statins, nitroglycerin, and ACE inhibitors. Available treatments for arthrofibrosis that could be combined with gene therapy provided herein include but are not limited to surgery, physical therapy, corticosteroid injections, non-steroidal anti-inflammatory drugs, and cryotherapy. Available treatments for Crohn's disease that could be combined with gene therapy provided herein include but are not limited to vitamin D, anti-inflammatory agents, non-steroidal anti-inflammatory agents, corticosteroids, immunosuppressants (e.g., Remicade®, adalimumab, methotrexate, mercaptopurine, or azathioprine), and antibiotics. Available treatments for mediastinal fibrosis that could be combined with gene therapy provided herein include but are not limited to tamoxifen, anti-inflammatory agents, non-steroidal anti-inflammatory agents (e.g., indocin), corticosteroids, immunosuppressants (e.g., Remicade®, adalimumab, methotrexate, mercaptopurine, or azathioprine). Available treatments for MF that could be combined with gene therapy provided herein include but are not limited to ruxolitinib, thalidomide, androgen therapy, blood transfusions, chemotherapeutics, and radiation treatment of the spleen. Available treatments for NSF that could be combined with gene therapy provided herein include but are not limited to oxygen therapy and bronchodilators. Available treatments for RPF that could be combined with gene therapy provided herein include but are not limited to corticosteroids, immunosuppressants (e.g, mycophenolate mofetil, methotrexate, azathioprine, or cyclophosphamide), and tamoxifen).

### 5.3.15. Anti-IL6R, Anti-IL6, and Anti-CD19 HuPTM Constructs and Formulations for NMO and Non-Infectious Uveitis and Detrimental Immune Response

[1019] Compositions and methods are described for the delivery of HuPTM mAbs and antigen-binding fragments thereof, such as HuPTM Fabs, that bind to interleukin-6 receptor (IL6R), interleukin-6 (IL6), or cluster of differentiation 19 (CD19), derived from an anti-IL6R, anti-IL6, or anti-CD19 antibody, such as satralizumab, sarilumab, tocilizumab, siltuximab, clazakizumab, sirukumab, olokizumab, gerilimzumab, or inebilizumab (FIGS. 16A-I), indicated for treating non-infectious uveitis, neuromyelitis optica (NMO), diabetic retinopathy (DR), or diabetic macular edema (DME). Also described are compositions and methods for the delivery of HuPTM mAbs and antigen-binding fragments thereof, such as HuPTM Fabs, that bind to interleukin-6 receptor (IL6R) or interleukin-6 (IL6) derived from an anti-IL6R, anti-IL6, or anti-CD19 antibody, such as satralizumab, sarilumab, tocilizumab, siltuximab, clazakizumab, sirukumab, olokizumab, or gerilimzumab (FIGS. 16A-H), indicated for treating, inhibiting or ameliorating a detrimental immune response, such as inflammation, cytokine release syndrome and the like associated with viral or bacterial infection or administration of an immune-promoting therapeutic, such as an immune-oncology antibody, protein or cell based therapy, such as a CAR-T therapy. In certain embodiments, the HuPTM mAb has the amino acid sequence of satralizumab, sarilumab, tocilizumab, siltuximab, clazakizumab, sirukumab, olokizumab, gerilimzumab, inebilizumab, or an antigen binding fragment thereof. Amino acid sequences of Fab fragments of the antibody are provided in FIGS. 16A-I. Delivery may be accomplished via gene therapy—e.g., by administering a viral vector or other DNA expression construct encoding an IL6R-binding, IL6-binding, or CD19-binding HuPTM mAb (or an antigen binding fragment and/or a hyperglycosylated derivative or other derivative, thereof) to patients (human subjects) diagnosed with one or more symptoms of non-infectious uveitis, NMO, DR, or DME, or alternatively in need of treating, inhibiting or ameliorating a detrimental immune response to create a permanent depot that continuously supplies the human PTM, e.g., human-glycosylated, transgene product.

[1020] Transgenes

[1021] Provided are recombinant vectors containing a transgene encoding a HuPTM mAb or HuPTM Fab (or other antigen binding fragment of the HuPTM mAb) that binds to IL6R, IL6, or CD19 that can be administered to deliver the HuPTM mAb or antigen binding fragment in a patient. The transgene is a nucleic acid comprising the nucleotide sequences encoding an antigen binding fragment of an antibody that binds to IL6R, IL6, or CD19, such as satralizumab, sarilumab, tocilizumab, siltuximab, clazakizumab, sirukumab, olokizumab, gerilimzumab, inebilizumab, or variants thereof as detailed herein. The transgene may also encode an anti-IL6R, IL6, or anti-CD19 antigen binding fragment that contains additional glycosylation sites (e.g., see Courtois et al.).

[1022] In certain embodiments, the anti-IL6R antigen-binding fragment transgene comprises the nucleotide sequences encoding the heavy and light chains of the Fab portion of satralizumab (having amino acid sequences of SEQ ID NOs. 59 and 60, respectively, see Table 5 and FIG. 16A). The nucleotide sequences may be codon optimized for expression in human cells. Nucleotide sequences may, for example, comprise the nucleotide sequences of SEQ ID NO: 129 (encoding the satralizumab heavy chain Fab portion) and SEQ ID NO: 130 (encoding the satralizumab light chain Fab portion) as set forth in Table 6. The heavy and light chain sequences both have a signal or leader sequence at the N-terminus appropriate for expression and secretion in human cells, in particular, one or more cells forming the retina. The signal sequence may have the amino acid sequence of MYRMQLLLLIALSLALVTNS (SEQ ID NO: 146). Alternatively, the signal sequence may have an amino acid sequence selected from any one of the signal sequences set forth in Table 2 that correspond to the proteins secreted by one or more cells forming the retina. Alternatively, the signal sequence may be appropriate for expression in muscle or liver cells, such as those listed in Tables 3 and 4 infra.

[1023] In addition to the heavy and light chain variable domain and C_{H}1 and C_{L} domain sequences, the transgenes may comprise, at the C-terminus of the heavy chain C_{H}1 domain sequence, all or a portion of the hinge region. In specific embodiments, the anti-IL6R-antigen binding domain has a heavy chain Fab domain of SEQ ID NO: 59 with additional hinge region sequence starting after the C-terminal valine (V), contains all or a portion of the amino acid sequence ERKSCVECPPCPAPPVAG (SEQ ID NO: 433) or ERKSCVECPPCPA (SEQ ID NO: 434) as set forth in FIG. 16A. These hinge regions may be encoded by nucleotide sequences at the 3′ end of SEQ ID NO: 129 by the hinge region encoding sequences set forth in Table 6 (SEQ ID NO: 129). In another embodiment, the transgenes comprise the amino acid sequences encoding the full length (or substantially full length) heavy and light chains of the antibody, comprising the Fc domain at the C terminus of the heavy chain, e.g., having an amino acid sequence of SEQ ID NO: 309 (Table 7) or an IgG2 Fc domain, such as SEQ ID No. 284 or as depicted in FIG. 23, or a mutant or variant thereof. The Fc domain may be engineered for altered binding to one or more Fc receptors and/or effector function as disclosed in Section 5.1.9, infra.

[1024] In certain embodiments, the anti-IL6R antigen-binding fragment transgene encodes an IL6R antigen-binding fragment comprising a light chain comprising an amino acid sequence that is at least 85%, 86%, 87%, 88%, 89%, 90%, 91%, 92%, 93%, 94%, 95%, 96%, 97%, 98% or 99% identical to the sequence set forth in SEQ ID NO: 60. In certain embodiments, the anti-IL6R antigen-binding fragment transgene encodes an IL6R antigen-binding fragment comprising a heavy chain comprising an amino acid sequence that is at least 85%, 86%, 87%, 88%, 89%, 90%, 91%, 92%, 93%, 94%, 95%, 96%, 97%, 98% or 99% identical to the sequence set forth in SEQ ID NO: 59. In certain embodiments, the anti-IL6R antigen-binding fragment transgene encodes an antigen-binding fragment comprising a light chain comprising an amino acid sequence that is at least 85%, 86%, 87%, 88%, 89%, 90%, 91%, 92%, 93%, 94%, 95%, 96%, 97%, 98% or 99% identical to the sequence set forth in SEQ ID NO: 60 and a heavy chain comprising an amino acid sequence that is at least 85%, 86%, 87%, 88%, 89%, 90%, 91%, 92%, 93%, 94%, 95%, 96%, 97%, 98% or 99% identical to the sequence set forth in SEQ ID NO: 59. In specific embodiments, the IL6R antigen binding fragment comprises a heavy chain comprising an amino acid sequence of SEQ ID NO: 59 with 1, 2, 3, 4, 5, 6, 7, 8, 9, 10, 11, 12, 13, 14, 15 or more amino acid substitutions, insertions or deletions, and the substitutions, insertions or deletions are made, e.g., in the framework regions (e.g., those regions outside of the CDRs, which CDRs are underlined in FIG. 16A) or are substitutions with an amino acid present at that position in the heavy chain of one or more of the other therapeutic antibodies, for example, as identified by the alignment in FIG. 20A. In specific embodiments, the IL6R antigen binding fragment comprises a light chain comprising an amino acid sequence of SEQ ID NO: 60 with 1, 2, 3, 4, 5, 6, 7, 8, 9, 10, 11, 12, 13, 14, 15 or more amino acid substitutions, insertions or deletions, and the substitutions, insertions or deletions are made, e.g., in the framework regions (e.g., those regions outside of the CDRs, which CDRs are underlined in FIG. 16A) or are substitutions with an amino acid present at that position in the light chain of one or more of the other therapeutic antibodies, for example, as identified by the alignment in FIG. 20B.

[1025] In certain embodiments, the anti-IL6R antigen-binding fragment transgene encodes a hyperglycosylated satralizumab Fab, comprising a heavy chain and a light chain of SEQ ID NOs: 59 and 60, respectively, with one or more of the following mutations: L114N (heavy chain), Q160N or Q160S (light chain), and/or E195N (light chain) (see FIGS. 20A (heavy chain) and 20B (light chain)).

[1026] In certain embodiments, the anti-IL6R antigen-binding fragment transgene encodes an antigen-binding fragment and comprises the nucleotide sequences encoding the six satralizumab CDRs which are underlined in the heavy and light chain variable domain sequences of FIG. 16A which are spaced between framework regions, generally human framework regions, and associated with constant domains depending upon the form of the antigen-binding molecule, as is known in the art to form the heavy and/or light chain variable domain of an anti-IL6R antibody or antigen-binding fragment thereof.

[1027] In certain embodiments, the anti-IL6R antigen-binding fragment transgene comprises the nucleotide sequences encoding the heavy and light chains of the Fab portion of sarilumab (having amino acid sequences of SEQ ID NOs. 61 and 62, respectively, see Table 5 and FIG. 16B). The nucleotide sequences may be codon optimized for expression in human cells. Nucleotide sequences may, for example, comprise the nucleotide sequences of SEQ ID NO: 131 (encoding the sarilumab heavy chain Fab portion) and SEQ ID NO: 132 (encoding the sarilumab light chain Fab portion) as set forth in Table 6. The heavy and light chain sequences both have a signal or leader sequence at the N-terminus appropriate for expression and secretion in human cells, in particular, one or more cells forming the retina. The signal sequence may have the amino acid sequence of MYRMQLLLLIALSLALVTNS (SEQ ID NO: 146). Alternatively, the signal sequence may have an amino acid sequence selected from any one of the signal sequences set forth in Table 2 that correspond to the proteins secreted by one or more cells forming the retina. Alternatively, the signal sequence may be appropriate for expression in muscle or liver cells, such as those listed in Tables 3 and 4 infra.

[1028] In addition to the heavy and light chain variable domain and C_{H}1 and C_{L} domain sequences, the transgenes may comprise, at the C-terminus of the heavy chain C_{H}1 domain sequence, all or a portion of the hinge region. In specific embodiments, the anti-IL6R-antigen binding domain has a heavy chain Fab domain of SEQ ID NO: 61 with additional hinge region sequence starting after the C-terminal valine (V), contains all or a portion of the amino acid sequence EPKSCDKTHTCPPCPAPELLGG (SEQ ID NO: 194), and specifically, EPKSCDKTHL (SEQ ID NO: 196), EPKSCDKTHT (SEQ ID NO: 197), EPKSCDKTHTCPPCPA (SEQ ID NO: 198), EPKSCDKTHLCPPCPA (SEQ ID NO: 199), EPKSCDKTHTCPPCPAPELLGGPSVFL (SEQ ID NO: 200) or EPKSCDKTHLCPPCPAPELLGGPSVFL (SEQ ID NO: 201) as set forth in FIG. 16B. These hinge regions may be encoded by nucleotide sequences at the 3′ end of SEQ ID NO: 131 by the hinge region encoding sequences set forth in Table 6 (SEQ ID NO: 131). In another embodiment, the transgenes comprise the amino acid sequences encoding the full length (or substantially full length) heavy and light chains of the antibody, comprising the Fc domain at the C terminus of the heavy chain, e.g. having an amino acid sequence of SEQ ID NO: 310 (Table 7) or an IgG1 Fc domain, such as SEQ ID No. 283 or as depicted in FIG. 23, or a mutant or variant thereof. The Fc domain may be engineered for altered binding to one or more Fc receptors and/or effector function as disclosed in Section 5.1.9, infra.

[1029] In certain embodiments, the anti-IL6R antigen-binding fragment transgene encodes an IL6R antigen-binding fragment comprising a light chain comprising an amino acid sequence that is at least 85%, 86%, 87%, 88%, 89%, 90%, 91%, 92%, 93%, 94%, 95%, 96%, 97%, 98% or 99% identical to the sequence set forth in SEQ ID NO: 62. In certain embodiments, the anti-IL6R antigen-binding fragment transgene encodes an IL6R antigen-binding fragment comprising a heavy chain comprising an amino acid sequence that is at least 85%, 86%, 87%, 88%, 89%, 90%, 91%, 92%, 93%, 94%, 95%, 96%, 97%, 98% or 99% identical to the sequence set forth in SEQ ID NO: 61. In certain embodiments, the anti-IL6R antigen-binding fragment transgene encodes an antigen-binding fragment comprising a light chain comprising an amino acid sequence that is at least 85%, 86%, 87%, 88%, 89%, 90%, 91%, 92%, 93%, 94%, 95%, 96%, 97%, 98% or 99% identical to the sequence set forth in SEQ ID NO: 62 and a heavy chain comprising an amino acid sequence that is at least 85%, 86%, 87%, 88%, 89%, 90%, 91%, 92%, 93%, 94%, 95%, 96%, 97%, 98% or 99% identical to the sequence set forth in SEQ ID NO: 61. In specific embodiments, the IL6R antigen binding fragment comprises a heavy chain comprising an amino acid sequence of SEQ ID NO: 61 with 1, 2, 3, 4, 5, 6, 7, 8, 9, 10, 11, 12, 13, 14, 15 or more amino acid substitutions, insertions or deletions, and the substitutions, insertions or deletions are made, e.g., in the framework regions (e.g., those regions outside of the CDRs, which CDRs are underlined in FIG. 16B) or are substitutions with an amino acid present at that position in the heavy chain of one or more of the other therapeutic antibodies, for example, as identified by the alignment in FIG. 20A. In specific embodiments, the IL6R antigen binding fragment comprises a light chain comprising an amino acid sequence of SEQ ID NO: 62 with 1, 2, 3, 4, 5, 6, 7, 8, 9, 10, 11, 12, 13, 14, 15 or more amino acid substitutions, insertions or deletions, and the substitutions, insertions or deletions are made, e.g., in the framework regions (e.g., those regions outside of the CDRs, which CDRs are underlined in FIG. 16B) or are substitutions with an amino acid present at that position in the light chain of one or more of the other therapeutic antibodies, for example, as identified by the alignment in FIG. 20B.

[1030] In certain embodiments, the anti-IL6R antigen-binding fragment transgene encodes a hyperglycosylated sarilumab Fab, comprising a heavy chain and a light chain of SEQ ID NOs: 61 and 62, respectively, with one or more of the following mutations: M111N (heavy chain), Q160N or Q160S (light chain), and/or E195N (light chain) (see FIGS. 20A (heavy chain) and 20B (light chain)).

[1031] In certain embodiments, the anti-IL6R antigen-binding fragment transgene encodes an antigen-binding fragment and comprises the nucleotide sequences encoding the six sarilumab CDRs which are underlined in the heavy and light chain variable domain sequences of FIG. 16B which are spaced between framework regions, generally human framework regions, and associated with constant domains depending upon the form of the antigen-binding molecule, as is known in the art to form the heavy and/or light chain variable domain of an anti-IL6R antibody or antigen-binding fragment thereof.

[1032] In certain embodiments, the anti-IL6R antigen-binding fragment transgene comprises the nucleotide sequences encoding the heavy and light chains of the Fab portion of tocilizumab (having amino acid sequences of SEQ ID NOs. 341 and 342, respectively, see Table 5 and FIG. 16H). The nucleotide sequences may be codon optimized for expression in human cells. Nucleotide sequences may, for example, comprise the nucleotide sequences of SEQ ID NO: 353 (encoding the tocilizumab heavy chain Fab portion) and SEQ ID NO: 354 (encoding the tocilizumab light chain Fab portion) as set forth in Table 6. The heavy and light chain sequences both have a signal or leader sequence at the N-terminus appropriate for expression and secretion in human cells, in particular, one or more cells forming the retina. The signal sequence may have the amino acid sequence of MYRMQLLLLIALSLALVTNS (SEQ ID NO: 146). Alternatively, the signal sequence may have an amino acid sequence selected from any one of the signal sequences set forth in Table 2 that correspond to the proteins secreted by one or more cells forming the retina. Alternatively, the signal sequence may be appropriate for expression in muscle or liver cells, such as those listed in Tables 3 and 4 infra.

[1033] In addition to the heavy and light chain variable domain and C_{H}1 and C_{L} domain sequences, the transgenes may comprise, at the C-terminus of the heavy chain C_{H}1 domain sequence, all or a portion of the hinge region. In specific embodiments, the anti-IL6R-antigen binding domain has a heavy chain Fab domain of SEQ ID NO: 341 with additional hinge region sequence starting after the C-terminal valine (V), contains all or a portion of the amino acid sequence EPKSCDKTHTCPPCPAPELLGG (SEQ ID NO: 194), and specifically, EPKSCDKTHL (SEQ ID NO: 196), EPKSCDKTHT (SEQ ID NO: 197), EPKSCDKTHTCPPCPA (SEQ ID NO: 198), EPKSCDKTHLCPPCPA (SEQ ID NO: 199), EPKSCDEPKSCDKTHTCPPCPAPELLGG KTHTCPPCPAPELLGGPSVFL (SEQ ID NO: 200) or EPKSCDKTHLCPPCPAPELLGGPSVFL (SEQ ID NO: 201) as set forth in FIG. 16H. These hinge regions may be encoded by nucleotide sequences at the 3′ end of SEQ ID NO: 353 by the hinge region encoding sequences set forth in Table 6 (SEQ ID NO: 353). In another embodiment, the transgenes comprise the amino acid sequences encoding the full length (or substantially full length) heavy and light chains of the antibody, comprising the Fc domain at the C terminus of the heavy chain, e.g., having an amino acid sequence of SEQ ID NO: 359 (Table 7) or an IgG1 Fc domain, such as SEQ ID No. 283 or as depicted in FIG. 23, or a mutant or variant thereof. The Fc domain may be engineered for altered binding to one or more Fc receptors and/or effector function as disclosed in Section 5.1.9, infra.

[1034] In certain embodiments, the anti-IL6R antigen-binding fragment transgene encodes an IL6R antigen-binding fragment comprising a light chain comprising an amino acid sequence that is at least 85%, 86%, 87%, 88%, 89%, 90%, 91%, 92%, 93%, 94%, 95%, 96%, 97%, 98% or 99% identical to the sequence set forth in SEQ ID NO: 342. In certain embodiments, the anti-IL6R antigen-binding fragment transgene encodes an IL6R antigen-binding fragment comprising a heavy chain comprising an amino acid sequence that is at least 85%, 86%, 87%, 88%, 89%, 90%, 91%, 92%, 93%, 94%, 95%, 96%, 97%, 98% or 99% identical to the sequence set forth in SEQ ID NO: 341. In certain embodiments, the anti-IL6R antigen-binding fragment transgene encodes an antigen-binding fragment comprising a light chain comprising an amino acid sequence that is at least 85%, 86%, 87%, 88%, 89%, 90%, 91%, 92%, 93%, 94%, 95%, 96%, 97%, 98% or 99% identical to the sequence set forth in SEQ ID NO: 342 and a heavy chain comprising an amino acid sequence that is at least 85%, 86%, 87%, 88%, 89%, 90%, 91%, 92%, 93%, 94%, 95%, 96%, 97%, 98% or 99% identical to the sequence set forth in SEQ ID NO: 341. In specific embodiments, the IL6R antigen binding fragment comprises a heavy chain comprising an amino acid sequence of SEQ ID NO: 341 with 1, 2, 3, 4, 5, 6, 7, 8, 9, 10, 11, 12, 13, 14, 15 or more amino acid substitutions, insertions or deletions, and the substitutions, insertions or deletions are made, e.g., in the framework regions (e.g., those regions outside of the CDRs, which CDRs are underlined in FIG. 16H) or are substitutions with an amino acid present at that position in the heavy chain of one or more of the other therapeutic antibodies, for example, as identified by the alignment in FIG. 20A. In specific embodiments, the IL6R antigen binding fragment comprises a light chain comprising an amino acid sequence of SEQ ID NO: 342 with 1, 2, 3, 4, 5, 6, 7, 8, 9, 10, 11, 12, 13, 14, 15 or more amino acid substitutions, insertions or deletions, and the substitutions, insertions or deletions are made, e.g., in the framework regions (e.g., those regions outside of the CDRs, which CDRs are underlined in FIG. 16H) or are substitutions with an amino acid present at that position in the light chain of one or more of the other therapeutic antibodies, for example, as identified by the alignment in FIG. 20B.

[1035] In certain embodiments, the anti-IL6R antigen-binding fragment transgene encodes a hyperglycosylated tocilizumab Fab, comprising a heavy chain and a light chain of SEQ ID NOs: 341 and 342, respectively, with one or more of the following mutations: L115N (heavy chain), Q160N or Q160S (light chain), and/or E195N (light chain) (see FIGS. 20A (heavy chain) and 20B (light chain)).

[1036] In certain embodiments, the anti-IL6R antigen-binding fragment transgene encodes an antigen-binding fragment and comprises the nucleotide sequences encoding the six tocilizumab CDRs which are underlined in the heavy and light chain variable domain sequences of FIG. 16H which are spaced between framework regions, generally human framework regions, and associated with constant domains depending upon the form of the antigen-binding molecule, as is known in the art to form the heavy and/or light chain variable domain of an anti-IL6R antibody or antigen-binding fragment thereof.

[1037] In certain embodiments, the anti-IL6 antigen-binding fragment transgene comprises the nucleotide sequences encoding the heavy and light chains of the Fab portion of siltuximab (having amino acid sequences of SEQ ID NOs. 331 and 332, respectively, see Table 5 and FIG. 16C). The nucleotide sequences may be codon optimized for expression in human cells. Nucleotide sequences may, for example, comprise the nucleotide sequences of SEQ ID NO: 343 (encoding the siltuximab heavy chain Fab portion) and SEQ ID NO: 344 (encoding the siltuximab light chain Fab portion) as set forth in Table 6. The heavy and light chain sequences both have a signal or leader sequence at the N-terminus appropriate for expression and secretion in human cells, in particular, one or more cells forming the retina. The signal sequence may have the amino acid sequence of MYRMQLLLLIALSLALVTNS (SEQ ID NO: 146). Alternatively, the signal sequence may have an amino acid sequence selected from any one of the signal sequences set forth in Table 2 that correspond to the proteins secreted by one or more cells forming the retina. Alternatively, the signal sequence may be appropriate for expression in muscle or liver cells, such as those listed in Tables 3 and 4 infra.

[1038] In addition to the heavy and light chain variable domain and C_{H}1 and C_{L} domain sequences, the transgenes may comprise, at the C-terminus of the heavy chain C_{H}1 domain sequence, all or a portion of the hinge region. In specific embodiments, the anti-IL6-antigen binding domain has a heavy chain Fab domain of SEQ ID NO: 331 with additional hinge region sequence starting after the C-terminal valine (V), contains all or a portion of the amino acid sequence EPKSCDKTHTCPPCPAPELLGG (SEQ ID NO: 194), and specifically, EPKSCDKTHL (SEQ ID NO: 196), EPKSCDKTHT (SEQ ID NO: 197), EPKSCDKTHTCPPCPA (SEQ ID NO: 198), EPKSCDKTHLCPPCPA (SEQ ID NO: 199), EPKSCDKTHTCPPCPAPELLGGPSVFL (SEQ ID NO: 200) or EPKSCDKTHLCPPCPAPELLGGPSVFL (SEQ ID NO: 201) as set forth in FIG. 16C. These hinge regions may be encoded by nucleotide sequences at the 3′ end of SEQ ID NO: 343 by the hinge region encoding sequences set forth in Table 6 (SEQ ID NO: 343). In another embodiment, the transgenes comprise the amino acid sequences encoding the full length (or substantially full length) heavy and light chains of the antibody, comprising the Fc domain at the C terminus of the heavy chain, e.g. having an amino acid sequence of SEQ ID NO: 355 (Table 7) or an IgG1 Fc domain, such as SEQ ID No. 283 or as depicted in FIG. 23, or a mutant or variant thereof. The Fc domain may be engineered for altered binding to one or more Fc receptors and/or effector function as disclosed in Section 5.1.9, infra.

[1039] In certain embodiments, the anti-IL6 antigen-binding fragment transgene encodes an IL6 antigen-binding fragment comprising a light chain comprising an amino acid sequence that is at least 85%, 86%, 87%, 88%, 89%, 90%, 91%, 92%, 93%, 94%, 95%, 96%, 97%, 98% or 99% identical to the sequence set forth in SEQ ID NO: 332. In certain embodiments, the anti-IL6 antigen-binding fragment transgene encodes an IL6 antigen-binding fragment comprising a heavy chain comprising an amino acid sequence that is at least 85%, 86%, 87%, 88%, 89%, 90%, 91%, 92%, 93%, 94%, 95%, 96%, 97%, 98% or 99% identical to the sequence set forth in SEQ ID NO: 331. In certain embodiments, the anti-IL6 antigen-binding fragment transgene encodes an antigen-binding fragment comprising a light chain comprising an amino acid sequence that is at least 85%, 86%, 87%, 88%, 89%, 90%, 91%, 92%, 93%, 94%, 95%, 96%, 97%, 98% or 99% identical to the sequence set forth in SEQ ID NO: 332 and a heavy chain comprising an amino acid sequence that is at least 85%, 86%, 87%, 88%, 89%, 90%, 91%, 92%, 93%, 94%, 95%, 96%, 97%, 98% or 99% identical to the sequence set forth in SEQ ID NO: 331. In specific embodiments, the IL6 antigen binding fragment comprises a heavy chain comprising an amino acid sequence of SEQ ID NO: 331 with 1, 2, 3, 4, 5, 6, 7, 8, 9, 10, 11, 12, 13, 14, 15 or more amino acid substitutions, insertions or deletions, and the substitutions, insertions or deletions are made, e.g., in the framework regions (e.g., those regions outside of the CDRs, which CDRs are underlined in FIG. 16C) or are substitutions with an amino acid present at that position in the heavy chain of one or more of the other therapeutic antibodies, for example, as identified by the alignment in FIG. 20A. In specific embodiments, the IL6 antigen binding fragment comprises a light chain comprising an amino acid sequence of SEQ ID NO: 332 with 1, 2, 3, 4, 5, 6, 7, 8, 9, 10, 11, 12, 13, 14, 15 or more amino acid substitutions, insertions or deletions, and the substitutions, insertions or deletions are made, e.g., in the framework regions (e.g., those regions outside of the CDRs, which CDRs are underlined in FIG. 16C) or are substitutions with an amino acid present at that position in the light chain of one or more of the other therapeutic antibodies, for example, as identified by the alignment in FIG. 20B.

[1040] In certain embodiments, the anti-IL6 antigen-binding fragment transgene encodes a hyperglycosylated siltuximab Fab, comprising a heavy chain and a light chain of SEQ ID NOs: 331 and 332, respectively, with one or more of the following mutations: S114N (heavy chain), Q159N or Q159S (light chain), and/or E194N (light chain) (see FIGS. 20A (heavy chain) and 20B (light chain)).

[1041] In certain embodiments, the anti-IL6 antigen-binding fragment transgene encodes an antigen-binding fragment and comprises the nucleotide sequences encoding the six siltuximab CDRs which are underlined in the heavy and light chain variable domain sequences of FIG. 16C which are spaced between framework regions, generally human framework regions, and associated with constant domains depending upon the form of the antigen-binding molecule, as is known in the art to form the heavy and/or light chain variable domain of an anti-IL6 antibody or antigen-binding fragment thereof.

[1042] In certain embodiments, the anti-IL6 antigen-binding fragment transgene comprises the nucleotide sequences encoding the heavy and light chains of the Fab portion of clazakizumab (having amino acid sequences of SEQ ID NOs. 333 and 334, respectively, see Table 5 and FIG. 16D). The nucleotide sequences may be codon optimized for expression in human cells. Nucleotide sequences may, for example, comprise the nucleotide sequences of SEQ ID NO: 345 (encoding the clazakizumab heavy chain Fab portion) and SEQ ID NO: 346 (encoding the clazakizumab light chain Fab portion) as set forth in Table 6. The heavy and light chain sequences both have a signal or leader sequence at the N-terminus appropriate for expression and secretion in human cells, in particular, one or more cells forming the retina. The signal sequence may have the amino acid sequence of MYRMQLLLLIALSLALVTNS (SEQ ID NO: 146). Alternatively, the signal sequence may have an amino acid sequence selected from any one of the signal sequences set forth in Table 2 that correspond to the proteins secreted by one or more cells forming the retina. Alternatively, the signal sequence may be appropriate for expression in muscle or liver cells, such as those listed in Tables 3 and 4 infra.

[1043] In addition to the heavy and light chain variable domain and C_{H}1 and C_{L} domain sequences, the transgenes may comprise, at the C-terminus of the heavy chain C_{H}1 domain sequence, all or a portion of the hinge region. In specific embodiments, the anti-IL6-antigen binding domain has a heavy chain Fab domain of SEQ ID NO: 333 with additional hinge region sequence starting after the C-terminal valine (V), contains all or a portion of the amino acid sequence EPKSCDKTHTCPPCPAPELLGG (SEQ ID NO: 194), and specifically, EPKSCDKTHL (SEQ ID NO: 196), EPKSCDKTHT (SEQ ID NO: 197), EPKSCDKTHTCPPCPA (SEQ ID NO: 198), EPKSCDKTHLCPPCPA (SEQ ID NO: 199), EPKSCDKTHTCPPCPAPELLGGPSVFL (SEQ ID NO: 200) or EPKSCDKTHLCPPCPAPELLGGPSVFL (SEQ ID NO: 201) as set forth in FIG. 16D. These hinge regions may be encoded by nucleotide sequences at the 3′ end of SEQ ID NO: 345 by the hinge region encoding sequences set forth in Table 6 (SEQ ID NO: 345). In another embodiment, the transgenes comprise the amino acid sequences encoding the full length (or substantially full length) heavy and light chains of the antibody, comprising the Fc domain at the C terminus of the heavy chain, e.g. having an amino acid sequence of SEQ ID NO: 356 (Table 7) or an IgG1 Fc domain, such as SEQ ID No. 283 or as depicted in FIG. 23, or a mutant or variant thereof. The Fc domain may be engineered for altered binding to one or more Fc receptors and/or effector function as disclosed in Section 5.1.9, infra.

[1044] In certain embodiments, the anti-IL6 antigen-binding fragment transgene encodes an IL6 antigen-binding fragment comprising a light chain comprising an amino acid sequence that is at least 85%, 86%, 87%, 88%, 89%, 90%, 91%, 92%, 93%, 94%, 95%, 96%, 97%, 98% or 99% identical to the sequence set forth in SEQ ID NO: 334. In certain embodiments, the anti-IL6 antigen-binding fragment transgene encodes an IL6 antigen-binding fragment comprising a heavy chain comprising an amino acid sequence that is at least 85%, 86%, 87%, 88%, 89%, 90%, 91%, 92%, 93%, 94%, 95%, 96%, 97%, 98% or 99% identical to the sequence set forth in SEQ ID NO: 333. In certain embodiments, the anti-IL6 antigen-binding fragment transgene encodes an antigen-binding fragment comprising a light chain comprising an amino acid sequence that is at least 85%, 86%, 87%, 88%, 89%, 90%, 91%, 92%, 93%, 94%, 95%, 96%, 97%, 98% or 99% identical to the sequence set forth in SEQ ID NO: 334 and a heavy chain comprising an amino acid sequence that is at least 85%, 86%, 87%, 88%, 89%, 90%, 91%, 92%, 93%, 94%, 95%, 96%, 97%, 98% or 99% identical to the sequence set forth in SEQ ID NO: 333. In specific embodiments, the IL6 antigen binding fragment comprises a heavy chain comprising an amino acid sequence of SEQ ID NO: 333 with 1, 2, 3, 4, 5, 6, 7, 8, 9, 10, 11, 12, 13, 14, 15 or more amino acid substitutions, insertions or deletions, and the substitutions, insertions or deletions are made, e.g., in the framework regions (e.g., those regions outside of the CDRs, which CDRs are underlined in FIG. 16D) or are substitutions with an amino acid present at that position in the heavy chain of one or more of the other therapeutic antibodies, for example, as identified by the alignment in FIG. 20A. In specific embodiments, the IL6 antigen binding fragment comprises a light chain comprising an amino acid sequence of SEQ ID NO: 334 with 1, 2, 3, 4, 5, 6, 7, 8, 9, 10, 11, 12, 13, 14, 15 or more amino acid substitutions, insertions or deletions, and the substitutions, insertions or deletions are made, e.g., in the framework regions (e.g., those regions outside of the CDRs, which CDRs are underlined in FIG. 16D) or are substitutions with an amino acid present at that position in the light chain of one or more of the other therapeutic antibodies, for example, as identified by the alignment in FIG. 20B.

[1045] In certain embodiments, the anti-IL6 antigen-binding fragment transgene encodes a hyperglycosylated clazakizumab Fab, comprising a heavy chain and a light chain of SEQ ID NOs: 333 and 334, respectively, with one or more of the following mutations: L115N (heavy chain), Q163N or Q163 S (light chain), and/or E198N (light chain) (see FIGS. 20A (heavy chain) and 20B (light chain)).

[1046] In certain embodiments, the anti-IL6 antigen-binding fragment transgene encodes an antigen-binding fragment and comprises the nucleotide sequences encoding the six clazakizumab CDRs which are underlined in the heavy and light chain variable domain sequences of FIG. 16D which are spaced between framework regions, generally human framework regions, and associated with constant domains depending upon the form of the antigen-binding molecule, as is known in the art to form the heavy and/or light chain variable domain of an anti-IL6 antibody or antigen-binding fragment thereof.

[1047] In certain embodiments, the anti-IL6 antigen-binding fragment transgene comprises the nucleotide sequences encoding the heavy and light chains of the Fab portion of sirukumab (having amino acid sequences of SEQ ID NOs. 335 and 336, respectively, see Table 5 and FIG. 16E). The nucleotide sequences may be codon optimized for expression in human cells. Nucleotide sequences may, for example, comprise the nucleotide sequences of SEQ ID NO: 347 (encoding the sirukumab heavy chain Fab portion) and SEQ ID NO: 348 (encoding the sirukumab light chain Fab portion) as set forth in Table 6. The heavy and light chain sequences both have a signal or leader sequence at the N-terminus appropriate for expression and secretion in human cells, in particular, one or more cells forming the retina. The signal sequence may have the amino acid sequence of MYRMQLLLLIALSLALVTNS (SEQ ID NO: 146). Alternatively, the signal sequence may have an amino acid sequence selected from any one of the signal sequences set forth in Table 2 that correspond to the proteins secreted by one or more cells forming the retina. Alternatively, the signal sequence may be appropriate for expression in muscle or liver cells, such as those listed in Tables 3 and 4 infra.

[1048] In addition to the heavy and light chain variable domain and C_{H}1 and C_{L} domain sequences, the transgenes may comprise, at the C-terminus of the heavy chain C_{H}1 domain sequence, all or a portion of the hinge region. In specific embodiments, the anti-IL6-antigen binding domain has a heavy chain Fab domain of SEQ ID NO: 335 with additional hinge region sequence starting after the C-terminal valine (V), contains all or a portion of the amino acid sequence EPKSCDKTHTCPPCPAPELLGG (SEQ ID NO: 194), and specifically, EPKSCDKTHL (SEQ ID NO: 196), EPKSCDKTHT (SEQ ID NO: 197), EPKSCDKTHTCPPCPA (SEQ ID NO: 198), EPKSCDKTHLCPPCPA (SEQ ID NO: 199), EPKSCDKTHTCPPCPAPELLGGPSVFL (SEQ ID NO: 200) or EPKSCDKTHLCPPCPAPELLGGPSVFL (SEQ ID NO: 201) as set forth in FIG. 16E. These hinge regions may be encoded by nucleotide sequences at the 3′ end of SEQ ID NO: 347 by the hinge region encoding sequences set forth in Table 6 (SEQ ID NO: 347). In another embodiment, the transgenes comprise the amino acid sequences encoding the full length (or substantially full length) heavy and light chains of the antibody, comprising the Fc domain at the C terminus of the heavy chain, e.g. having an amino acid sequence of SEQ ID NO: 357 (Table 7) or an IgG1 Fc domain, such as SEQ ID No. 283 or as depicted in FIG. 23, or a mutant or variant thereof. The Fc domain may be engineered for altered binding to one or more Fc receptors and/or effector function as disclosed in Section 5.1.9, infra.

[1049] In certain embodiments, the anti-IL6 antigen-binding fragment transgene encodes an IL6 antigen-binding fragment comprising a light chain comprising an amino acid sequence that is at least 85%, 86%, 87%, 88%, 89%, 90%, 91%, 92%, 93%, 94%, 95%, 96%, 97%, 98% or 99% identical to the sequence set forth in SEQ ID NO: 336. In certain embodiments, the anti-IL6 antigen-binding fragment transgene encodes an IL6 antigen-binding fragment comprising a heavy chain comprising an amino acid sequence that is at least 85%, 86%, 87%, 88%, 89%, 90%, 91%, 92%, 93%, 94%, 95%, 96%, 97%, 98% or 99% identical to the sequence set forth in SEQ ID NO: 335. In certain embodiments, the anti-IL6 antigen-binding fragment transgene encodes an antigen-binding fragment comprising a light chain comprising an amino acid sequence that is at least 85%, 86%, 87%, 88%, 89%, 90%, 91%, 92%, 93%, 94%, 95%, 96%, 97%, 98% or 99% identical to the sequence set forth in SEQ ID NO: 336 and a heavy chain comprising an amino acid sequence that is at least 85%, 86%, 87%, 88%, 89%, 90%, 91%, 92%, 93%, 94%, 95%, 96%, 97%, 98% or 99% identical to the sequence set forth in SEQ ID NO: 335. In specific embodiments, the IL6 antigen binding fragment comprises a heavy chain comprising an amino acid sequence of SEQ ID NO: 335 with 1, 2, 3, 4, 5, 6, 7, 8, 9, 10, 11, 12, 13, 14, 15 or more amino acid substitutions, insertions or deletions, and the substitutions, insertions or deletions are made, e.g., in the framework regions (e.g., those regions outside of the CDRs, which CDRs are underlined in FIG. 16E) or are substitutions with an amino acid present at that position in the heavy chain of one or more of the other therapeutic antibodies, for example, as identified by the alignment in FIG. 20A. In specific embodiments, the IL6 antigen binding fragment comprises a light chain comprising an amino acid sequence of SEQ ID NO: 336 with 1, 2, 3, 4, 5, 6, 7, 8, 9, 10, 11, 12, 13, 14, 15 or more amino acid substitutions, insertions or deletions, and the substitutions, insertions or deletions are made, e.g., in the framework regions (e.g., those regions outside of the CDRs, which CDRs are underlined in FIG. 16E) or are substitutions with an amino acid present at that position in the light chain of one or more of the other therapeutic antibodies, for example, as identified by the alignment in FIG. 20B.

[1050] In certain embodiments, the anti-IL6 antigen-binding fragment transgene encodes a hyperglycosylated sirukumab Fab, comprising a heavy chain and a light chain of SEQ ID NOs: 335 and 336, respectively, with one or more of the following mutations: T114N (heavy chain), Q159N or Q159S (light chain), and/or E194N (light chain) (see FIGS. 20A (heavy chain) and 20B (light chain)).

[1051] In certain embodiments, the anti-IL6 antigen-binding fragment transgene encodes an antigen-binding fragment and comprises the nucleotide sequences encoding the six sirukumab CDRs which are underlined in the heavy and light chain variable domain sequences of FIG. 16E which are spaced between framework regions, generally human framework regions, and associated with constant domains depending upon the form of the antigen-binding molecule, as is known in the art to form the heavy and/or light chain variable domain of an anti-IL6 antibody or antigen-binding fragment thereof.

[1052] In certain embodiments, the anti-IL6 antigen-binding fragment transgene comprises the nucleotide sequences encoding the heavy and light chains of the Fab portion of olokizumab (having amino acid sequences of SEQ ID NOs. 337 and 338, respectively, see Table 5 and FIG. 16F). The nucleotide sequences may be codon optimized for expression in human cells. Nucleotide sequences may, for example, comprise the nucleotide sequences of SEQ ID NO: 349 (encoding the olokizumab heavy chain Fab portion) and SEQ ID NO: 350 (encoding the olokizumab light chain Fab portion) as set forth in Table 6. The heavy and light chain sequences both have a signal or leader sequence at the N-terminus appropriate for expression and secretion in human cells, in particular, one or more cells forming the retina. The signal sequence may have the amino acid sequence of MYRMQLLLLIALSLALVTNS (SEQ ID NO: 146). Alternatively, the signal sequence may have an amino acid sequence selected from any one of the signal sequences set forth in Table 2 that correspond to the proteins secreted by one or more cells forming the retina. Alternatively, the signal sequence may be appropriate for expression in muscle or liver cells, such as those listed in Tables 3 and 4 infra.

[1053] In addition to the heavy and light chain variable domain and C_{H}1 and C_{L} domain sequences, the transgenes may comprise, at the C-terminus of the heavy chain C_{H}1 domain sequence, all or a portion of the hinge region. In specific embodiments, the anti-IL6-antigen binding domain has a heavy chain Fab domain of SEQ ID NO: 337 with additional hinge region sequence starting after the C-terminal valine (V), contains all or a portion of the amino acid sequence ESKYGPPCPPCPAPEFLGG (SEQ ID NO: 214), and specifically, ESKYGPPCPPCPA (SEQ ID NO: 216), ESKYGPPCPSCPA (SEQ ID NO: 217), ESKYGPPCPSCPAPEFLGGPSVFL (SEQ ID NO: 218), or ESKYGPPCPPCPAPEFLGGPSVFL (SEQ ID NO: 219) as set forth in FIG. 16F. These hinge regions may be encoded by nucleotide sequences at the 3′ end of SEQ ID NO: 349 by the hinge region encoding sequences set forth in Table 6 (SEQ ID NO: 349). In another embodiment, the transgenes comprise the amino acid sequences encoding the full length (or substantially full length) heavy and light chains of the antibody, comprising the Fc domain at the C terminus of the heavy chain, e.g. having an amino acid sequence of SEQ ID NO: 358 (Table 7) or an IgG4 Fc domain, such as SEQ ID No. 285 or as depicted in FIG. 23, or a mutant or variant thereof. The Fc domain may be engineered for altered binding to one or more Fc receptors and/or effector function as disclosed in Section 5.1.9, infra.

[1054] In certain embodiments, the anti-IL6 antigen-binding fragment transgene encodes an IL6 antigen-binding fragment comprising a light chain comprising an amino acid sequence that is at least 85%, 86%, 87%, 88%, 89%, 90%, 91%, 92%, 93%, 94%, 95%, 96%, 97%, 98% or 99% identical to the sequence set forth in SEQ ID NO: 338. In certain embodiments, the anti-IL6 antigen-binding fragment transgene encodes an IL6 antigen-binding fragment comprising a heavy chain comprising an amino acid sequence that is at least 85%, 86%, 87%, 88%, 89%, 90%, 91%, 92%, 93%, 94%, 95%, 96%, 97%, 98% or 99% identical to the sequence set forth in SEQ ID NO: 337. In certain embodiments, the anti-IL6 antigen-binding fragment transgene encodes an antigen-binding fragment comprising a light chain comprising an amino acid sequence that is at least 85%, 86%, 87%, 88%, 89%, 90%, 91%, 92%, 93%, 94%, 95%, 96%, 97%, 98% or 99% identical to the sequence set forth in SEQ ID NO: 338 and a heavy chain comprising an amino acid sequence that is at least 85%, 86%, 87%, 88%, 89%, 90%, 91%, 92%, 93%, 94%, 95%, 96%, 97%, 98% or 99% identical to the sequence set forth in SEQ ID NO: 337. In specific embodiments, the IL6 antigen binding fragment comprises a heavy chain comprising an amino acid sequence of SEQ ID NO: 337 with 1, 2, 3, 4, 5, 6, 7, 8, 9, 10, 11, 12, 13, 14, 15 or more amino acid substitutions, insertions or deletions, and the substitutions, insertions or deletions are made, e.g., in the framework regions (e.g., those regions outside of the CDRs, which CDRs are underlined in FIG. 16F) or are substitutions with an amino acid present at that position in the heavy chain of one or more of the other therapeutic antibodies, for example, as identified by the alignment in FIG. 20A. In specific embodiments, the IL6 antigen binding fragment comprises a light chain comprising an amino acid sequence of SEQ ID NO: 338 with 1, 2, 3, 4, 5, 6, 7, 8, 9, 10, 11, 12, 13, 14, 15 or more amino acid substitutions, insertions or deletions, and the substitutions, insertions or deletions are made, e.g., in the framework regions (e.g., those regions outside of the CDRs, which CDRs are underlined in FIG. 16F) or are substitutions with an amino acid present at that position in the light chain of one or more of the other therapeutic antibodies, for example, as identified by the alignment in FIG. 20B.

[1055] In certain embodiments, the anti-IL6 antigen-binding fragment transgene encodes a hyperglycosylated olizikumab Fab, comprising a heavy chain and a light chain of SEQ ID NOs: 337 and 338, respectively, with one or more of the following mutations: L115N (heavy chain), Q160N or Q160S (light chain), and/or E195N (light chain) (see FIGS. 20A (heavy chain) and 20B (light chain)).

[1056] In certain embodiments, the anti-IL6 antigen-binding fragment transgene encodes an antigen-binding fragment and comprises the nucleotide sequences encoding the six olokizumab CDRs which are underlined in the heavy and light chain variable domain sequences of FIG. 16F which are spaced between framework regions, generally human framework regions, and associated with constant domains depending upon the form of the antigen-binding molecule, as is known in the art to form the heavy and/or light chain variable domain of an anti-IL6 antibody or antigen-binding fragment thereof.

[1057] In certain embodiments, the anti-IL6 antigen-binding fragment transgene comprises the nucleotide sequences encoding the heavy and light chains of the Fab portion of gerilimzumab (having amino acid sequences of SEQ ID NOs. 339 and 340, respectively, see Table 5 and FIG. 16G). The nucleotide sequences may be codon optimized for expression in human cells. Nucleotide sequences may, for example, comprise the nucleotide sequences of SEQ ID NO: 351 (encoding the gerilimzumab heavy chain Fab portion) and SEQ ID NO: 352 (encoding the gerilimzumab light chain Fab portion) as set forth in Table 6. The heavy and light chain sequences both have a signal or leader sequence at the N-terminus appropriate for expression and secretion in human cells, in particular, one or more cells forming the retina. The signal sequence may have the amino acid sequence of MYRMQLLLLIALSLALVTNS (SEQ ID NO: 146). Alternatively, the signal sequence may have an amino acid sequence selected from any one of the signal sequences set forth in Table 2 that correspond to the proteins secreted by one or more cells forming the retina. Alternatively, the signal sequence may be appropriate for expression in muscle or liver cells, such as those listed in Tables 3 and 4 infra.

[1058] In addition to the heavy and light chain variable domain and C_{H}1 and C_{L} domain sequences, the transgenes may comprise, at the C-terminus of the heavy chain C_{H}1 domain sequence, all or a portion of the hinge region. In specific embodiments, the anti-IL6-antigen binding domain has a heavy chain Fab domain of SEQ ID NO: 339 with additional hinge region sequence starting after the C-terminal valine (V), contains all or a portion of the amino acid sequence EPKSCDKTHTCPPCPAPELLGG (SEQ ID NO: 194), and specifically, EPKSCDKTHL (SEQ ID NO: 196), EPKSCDKTHT (SEQ ID NO: 197), EPKSCDKTHTCPPCPA (SEQ ID NO: 198), EPKSCDKTHLCPPCPA (SEQ ID NO: 199), EPKSCDKTHTCPPCPAPELLGGPSVFL (SEQ ID NO: 200) or EPKSCDKTHLCPPCPAPELLGGPSVFL (SEQ ID NO: 201) as set forth in FIG. 16G. These hinge regions may be encoded by nucleotide sequences at the 3′ end of SEQ ID NO: 351 by the hinge region encoding sequences set forth in Table 7 (SEQ ID NO: 351). In another embodiment, the transgenes comprise the amino acid sequences encoding the full length (or substantially full length) heavy and light chains of the antibody, comprising the Fc domain at the C terminus of the heavy chain, e.g. having an IgG1 Fc domain, such as SEQ ID No. 283 or as depicted in FIG. 23, or a mutant or variant thereof. The Fc domain may be engineered for altered binding to one or more Fc receptors and/or effector function as disclosed in Section 5.1.9, infra.

[1059] In certain embodiments, the anti-IL6 antigen-binding fragment transgene encodes an IL6 antigen-binding fragment comprising a light chain comprising an amino acid sequence that is at least 85%, 86%, 87%, 88%, 89%, 90%, 91%, 92%, 93%, 94%, 95%, 96%, 97%, 98% or 99% identical to the sequence set forth in SEQ ID NO: 340. In certain embodiments, the anti-IL6 antigen-binding fragment transgene encodes an IL6 antigen-binding fragment comprising a heavy chain comprising an amino acid sequence that is at least 85%, 86%, 87%, 88%, 89%, 90%, 91%, 92%, 93%, 94%, 95%, 96%, 97%, 98% or 99% identical to the sequence set forth in SEQ ID NO: 339. In certain embodiments, the anti-IL6 antigen-binding fragment transgene encodes an antigen-binding fragment comprising a light chain comprising an amino acid sequence that is at least 85%, 86%, 87%, 88%, 89%, 90%, 91%, 92%, 93%, 94%, 95%, 96%, 97%, 98% or 99% identical to the sequence set forth in SEQ ID NO: 340 and a heavy chain comprising an amino acid sequence that is at least 85%, 86%, 87%, 88%, 89%, 90%, 91%, 92%, 93%, 94%, 95%, 96%, 97%, 98% or 99% identical to the sequence set forth in SEQ ID NO: 339. In specific embodiments, the IL6 antigen binding fragment comprises a heavy chain comprising an amino acid sequence of SEQ ID NO: 339 with 1, 2, 3, 4, 5, 6, 7, 8, 9, 10, 11, 12, 13, 14, 15 or more amino acid substitutions, insertions or deletions, and the substitutions, insertions or deletions are made, e.g., in the framework regions (e.g., those regions outside of the CDRs, which CDRs are underlined in FIG. 16G) or are substitutions with an amino acid present at that position in the heavy chain of one or more of the other therapeutic antibodies, for example, as identified by the alignment in FIG. 20A. In specific embodiments, the IL6 antigen binding fragment comprises a light chain comprising an amino acid sequence of SEQ ID NO: 340 with 1, 2, 3, 4, 5, 6, 7, 8, 9, 10, 11, 12, 13, 14, 15 or more amino acid substitutions, insertions or deletions, and the substitutions, insertions or deletions are made, e.g., in the framework regions (e.g., those regions outside of the CDRs, which CDRs are underlined in FIG. 16G) or are substitutions with an amino acid present at that position in the light chain of one or more of the other therapeutic antibodies, for example, as identified by the alignment in FIG. 20B.

[1060] In certain embodiments, the anti-IL6 antigen-binding fragment transgene encodes a hyperglycosylated gerilimzumab Fab, comprising a heavy chain and a light chain of SEQ ID NOs: 339 and 340, respectively, with one or more of the following mutations: M117N (heavy chain), and/or Q198N (light chain) (see FIGS. 20A (heavy chain) and 20B (light chain)).

[1061] In certain embodiments, the anti-IL6 antigen-binding fragment transgene encodes an antigen-binding fragment and comprises the nucleotide sequences encoding the six gerilimzumab CDRs which are underlined in the heavy and light chain variable domain sequences of FIG. 16G which are spaced between framework regions, generally human framework regions, and associated with constant domains depending upon the form of the antigen-binding molecule, as is known in the art to form the heavy and/or light chain variable domain of an anti-IL6 antibody or antigen-binding fragment thereof.

[1062] In certain embodiments, the anti-CD19 antigen-binding fragment transgene comprises the nucleotide sequences encoding the heavy and light chains of the Fab portion of inebilizumab (having amino acid sequences of SEQ ID NOs. 63 and 64, respectively, see Table 5 and FIG. 16I). The nucleotide sequences may be codon optimized for expression in human cells. Nucleotide sequences may, for example, comprise the nucleotide sequences of SEQ ID NO: 133 (encoding the inebilizumab heavy chain Fab portion) and SEQ ID NO: 134 (encoding the inebilizumab light chain Fab portion) as set forth in Table 6. The heavy and light chain sequences both have a signal or leader sequence at the N-terminus appropriate for expression and secretion in human cells, in particular, one or more cells forming the retina. The signal sequence may have the amino acid sequence of MYRMQLLLLIALSLALVTNS (SEQ ID NO: 146). Alternatively, the signal sequence may have an amino acid sequence selected from any one of the signal sequences set forth in Table 2 that correspond to the proteins secreted by one or more cells forming the retina. Alternatively, the signal sequence may be appropriate for expression in muscle or liver cells, such as those listed in Tables 3 and 4 infra.

[1063] In addition to the heavy and light chain variable domain and C_{H}1 and C_{L} domain sequences, the transgenes may comprise, at the C-terminus of the heavy chain C_{H}1 domain sequence, all or a portion of the hinge region. In specific embodiments, the anti-CD19-antigen binding domain has a heavy chain Fab domain of SEQ ID NO: 63 with additional hinge region sequence starting after the C-terminal valine (V), contains all or a portion of the amino acid sequence EPKSCDKTHTCPPCPAPELLGG (SEQ ID NO: 194), and specifically, EPKSCDKTHL (SEQ ID NO: 196), EPKSCDKTHT (SEQ ID NO: 197), EPKSCDKTHTCPPCPA (SEQ ID NO: 198), EPKSCDKTHLCPPCPA (SEQ ID NO: 199), EPKSCDKTHTCPPCPAPELLGGPSVFL (SEQ ID NO: 200) or EPKSCDKTHLCPPCPAPELLGGPSVFL (SEQ ID NO: 201) as set forth in FIG. 16C. These hinge regions may be encoded by nucleotide sequences at the 3′ end of SEQ ID NO: 133 by the hinge region encoding sequences set forth in Table 6 (SEQ ID NO: 133). In another embodiment, the transgenes comprise the amino acid sequences encoding the full length (or substantially full length) heavy and light chains of the antibody, comprising the Fc domain at the C terminus of the heavy chain, e.g., having an amino acid sequence of SEQ ID NO: 311 (Table 7) or an IgG1 Fc domain, such as SEQ ID No. 283 or as depicted in FIG. 23, or a mutant or variant thereof. The Fc domain may be engineered for altered binding to one or more Fc receptors and/or effector function as disclosed in Section 5.1.9, infra.

[1064] In certain embodiments, the anti-CD19 antigen-binding fragment transgene encodes an CD19 antigen-binding fragment comprising a light chain comprising an amino acid sequence that is at least 85%, 86%, 87%, 88%, 89%, 90%, 91%, 92%, 93%, 94%, 95%, 96%, 97%, 98% or 99% identical to the sequence set forth in SEQ ID NO: 64. In certain embodiments, the anti-CD19 antigen-binding fragment transgene encodes an CD19 antigen-binding fragment comprising a heavy chain comprising an amino acid sequence that is at least 85%, 86%, 87%, 88%, 89%, 90%, 91%, 92%, 93%, 94%, 95%, 96%, 97%, 98% or 99% identical to the sequence set forth in SEQ ID NO: 63. In certain embodiments, the anti-CD19 antigen-binding fragment transgene encodes an antigen-binding fragment comprising a light chain comprising an amino acid sequence that is at least 85%, 86%, 87%, 88%, 89%, 90%, 91%, 92%, 93%, 94%, 95%, 96%, 97%, 98% or 99% identical to the sequence set forth in SEQ ID NO: 64 and a heavy chain comprising an amino acid sequence that is at least 85%, 86%, 87%, 88%, 89%, 90%, 91%, 92%, 93%, 94%, 95%, 96%, 97%, 98% or 99% identical to the sequence set forth in SEQ ID NO: 63. In specific embodiments, the CD19 antigen binding fragment comprises a heavy chain comprising an amino acid sequence of SEQ ID NO: 63 with 1, 2, 3, 4, 5, 6, 7, 8, 9, 10, 11, 12, 13, 14, 15 or more amino acid substitutions, insertions or deletions, and the substitutions, insertions or deletions are made, e.g., in the framework regions (e.g., those regions outside of the CDRs, which CDRs are underlined in FIG. 16I) or are substitutions with an amino acid present at that position in the heavy chain of one or more of the other therapeutic antibodies, for example, as identified by the alignment in FIG. 20A. In specific embodiments, the CD19 antigen binding fragment comprises a light chain comprising an amino acid sequence of SEQ ID NO: 64 with 1, 2, 3, 4, 5, 6, 7, 8, 9, 10, 11, 12, 13, 14, 15 or more amino acid substitutions, insertions or deletions, and the substitutions, insertions or deletions are made, e.g., in the framework regions (e.g., those regions outside of the CDRs, which CDRs are underlined in FIG. 16I) or are substitutions with an amino acid present at that position in the light chain of one or more of the other therapeutic antibodies, for example, as identified by the alignment in FIG. 20B.

[1065] In certain embodiments, the anti-CD19 antigen-binding fragment transgene encodes a hyperglycosylated inebilizumab Fab, comprising a heavy chain and a light chain of SEQ ID NOs: 63 and 64, respectively, with one or more of the following mutations: L116N (heavy chain), Q164N or Q164S (light chain), and/or E199N (light chain) (see FIGS. 20A (heavy chain) and 20B (light chain)).

[1066] In certain embodiments, the anti-CD19 antigen-binding fragment transgene encodes an antigen-binding fragment and comprises the nucleotide sequences encoding the six inebilizumab CDRs which are underlined in the heavy and light chain variable domain sequences of FIG. 16I which are spaced between framework regions, generally human framework regions, and associated with constant domains depending upon the form of the antigen-binding molecule, as is known in the art to form the heavy and/or light chain variable domain of an anti-CD19 antibody or antigen-binding fragment thereof.

[1067] Gene Therapy Methods

[1068] Provided are methods of treating human subjects for NMO by administration of a viral vector containing a transgene encoding an anti-IL6R, anti-IL6, or anti-CD19 antibody, or antigen binding fragment thereof. The antibody may be satralizumab, sarilumab, tocilizumab, siltuximab, clazakizumab, sirukumab, olokizumab, gerilimzumab, or inebilizumab, and is, e.g., a full length, substantially full length or Fab fragment thereof, or other antigen-binding fragment thereof.

[1069] Also provided are methods of treating human subjects for non-infectious uveitis, DR, or DME by administration of a viral vector containing a transgene encoding an anti-IL6R antibody, or anti-IL6 antibody, or antigen binding fragment thereof. The antibody may be satralizumab, sarilumab, tocilizumab, siltuximab, clazakizumab, sirukumab, olokizumab, or gerilimzumab, and is, e.g., a Fab fragment thereof, or other antigen-binding fragment thereof.

[1070] In embodiments, the patient has been diagnosed with and/or has symptom(s) associated with one or more ocular disorders. Recombinant vectors used for delivering the transgene are described in Section 5.4.3. Such vectors should have a tropism for human retina-type cells and can include non-replicating rAAV, particularly those bearing an AAV8 capsid. Alternatively, vectors bearing an AAV2.7m8 or AAV9 capsid can be used for ocular indications. The recombinant vectors, such as the ones shown in FIGS. 16A-I, can be administered in any manner such that the recombinant vector enters the retina, e.g., by introducing the recombinant vector into the eye. See Section 5.5.3 for details regarding the methods of treatment.

[1071] Provided are methods of treating, inhibiting or ameliorating a detrimental immune response in human subjects by administration of a viral vector containing a transgene encoding an anti-IL6R or anti-IL6 antibody, or antigen binding fragment thereof. The antibody may be satralizumab, sarilumab, tocilizumab, siltuximab, clazakizumab, sirukumab, olokizumab, or gerilimzumab, and is, e.g., a full length, substantially full length or Fab fragment thereof, or other antigen-binding fragment thereof.

[1072] In embodiments, the patient has been diagnosed with and/or has symptom(s) associated with a detrimental immune response, such as inflammation or a cytokine storm associated with a viral or bacterial infection or is in need of therapy to manage adverse side effects, including prophylactically, such as inflammation and/or cytokine release syndrome that may be triggered by a bacterial or viral infection, or an immunotherapeutic, such as an immune-oncology therapeutic or an immune cell based therapy, such as, for example, a CAR-T cell based therapy. Viral infections include influenza, coronavirus, such as SARS-CoV-2 or other coronaviral infection, etc. Immunotherapeutics that may trigger adverse effects that may be prevented or ameliorated include BiTE single-chain antibodies, CAR-T therapeutics, such as, but not limited to tisagenlecleucel (KYMRIAH®) or axicabtagene ciloleucel (YESCARTA®) or other immunooncology therapeutics, such as anti-thymocyte globulin (ATG), the CD28 superagonist TGN1412, rituximab, obinutuzumab, alemtuzumab, brentuximab, dacetuzumab, ipilimumab, nivolumab or pembrolizumab. oxaliplatin or lenalidomide. Recombinant vectors used for delivering the transgene are described in Section 5.4.2. Such vectors should have a tropism for human muscle or liver cells and can include non-replicating rAAV, particularly those bearing an AAV8 or AAV9 capsid. The recombinant vectors, such as the ones shown in FIGS. 16A-H, can be administered in any manner such that the recombinant vector enters the liver or muscles, e.g., by introducing the recombinant vector into the bloodstream. See Section 5.5.2 for details regarding the methods of treatment.

[1073] Subjects to whom such gene therapy is administered can be those responsive to anti-IL6R, anti-IL6, or anti-CD19 therapy. In certain embodiments, the methods encompass treating patients who have been diagnosed with one or more ocular disorders, or have one or more symptoms associated therewith, and identified as responsive to treatment with an anti-IL6R, anti-IL6, or anti-CD19 antibody or considered a good candidate for therapy with an anti-IL6R, anti-IL6, or anti-CD19 antibody. In specific embodiments, the patients have previously been treated with satralizumab, sarilumab, tocilizumab, siltuximab, clazakizumab, sirukumab, olokizumab, gerilimzumab, or inebilizumab, and have been found to be responsive to satralizumab, sarilumab, tocilizumab, siltuximab, clazakizumab, sirukumab, olokizumab, gerilimzumab, or inebilizumab. In other embodiments, the patients have been previously treated with an anti-IL6R, anti-IL6, or anti-CD19 antibody. To determine responsiveness, the anti-IL6R, anti-IL6, or anti-CD19 antibody or antigen-binding fragment transgene product (e.g., produced in cell culture, bioreactors, etc.) may be administered directly to the subject.

[1074] Human Post Translationally Modified Antibodies

[1075] The production of the anti-IL6R, anti-IL6, or anti-CD19 HuPTM mAb or HuPTM Fab, should result in a “biobetter” molecule for the treatment of one of more ocular disorders accomplished via gene therapy—e.g., by administering a viral vector or other DNA expression construct encoding the anti-IL6R, anti-IL6, or anti-CD19 HuPTM Fab, subretinally, intravitreally, or suprachoroidally to human subjects (patients) diagnosed with or having one or more symptoms of non-infectious uveitis, NMO, DR, or DME, to create a permanent depot in the retina that continuously supplies the fully-human post-translationally modified, e.g., human-glycosylated, sulfated transgene product produced by transduced cells of the retina. Alternatively, the production of the anti-IL6R, anti-IL6, or anti-CD19 HuPTM mAb or HuPTM Fab, should result in a “biobetter” molecule for the treatment, inhibition or amelioration of a detrimental immune response accomplished via gene therapy—e.g., by administering a viral vector or other DNA expression construct encoding the anti-IL6R or anti-IL6, HuPTM Fab or HuPTM Mab, subcutaneously, intramuscularly or intravenously to human subjects (patients) diagnosed with or having one or more symptoms of a detrimental immune response or to manage side effects of immune therapy, to create a permanent depot in the retina that continuously supplies the fully-human post-translationally modified, e.g., human-glycosylated, sulfated transgene product produced by transduced cells of the liver and/or muscle.

[1076] In specific embodiments, the anti-IL6R HuPTM mAb or antigen-binding fragment thereof has heavy and light chains with the amino acid sequences of the heavy and light chain Fab portions of satralizumab as set forth in FIG. 16A (with glutamine (Q) glycosylation sites; asparaginal (N) glycosylation sites, non-consensus asparaginal (N) glycosylation sites; and tyrosine-O-sulfation sites (Y) are as indicated in the legend) has a glycosylation, particularly a 2,6-sialylation, at one or more of the amino acid positions N77, N161, N194, and/or N203 of the heavy chain (SEQ ID NO:59) or Q100, N158, and/or N210 of the light chain (SEQ ID NO: 60). Alternatively or in addition to, the HuPTM mAb or antigen binding-fragment thereof with the heavy and light chain variable domain sequences of satralizumab has a sulfation group at Y94, Y95, and/or Y200 of the heavy chain (SEQ ID NO: 59) and/or Y49, Y50, Y86, and/or Y87 of the light chain (SEQ ID NO: 60). In other embodiments, the anti-IL6R HuPTM mAb or antigen-binding fragment thereof does not contain any detectable NeuGc moieties and/or does not contain any detectable alpha-Gal moieties. In certain embodiments, the HuPTM mAb is a full length or substantially full length mAb with an Fc region.

[1077] In specific embodiments, the anti-IL6R HuPTM mAb or antigen-binding fragment thereof has heavy and light chains with the amino acid sequences of the heavy and light chain Fab portions of sarilumab as set forth in FIG. 16B (with glutamine (Q) glycosylation sites; asparaginal (N) glycosylation sites, non-consensus asparaginal (N) glycosylation sites; and tyrosine-O-sulfation sites (Y) are as indicated in the legend) has a glycosylation, particularly a 2,6-sialylation, at one or more of the amino acid positions N54, Q108, and/or N158 of the heavy chain (SEQ ID NO:61) or Q100, N158, and/or N210 of the light chain (SEQ ID NO:62). Alternatively or in addition to, the HuPTM mAb or antigen binding-fragment thereof with the heavy and light chain variable domain sequences of sarilumab has a sulfation group at Y32, Y94, and/or Y95 of the heavy chain (SEQ ID NO:61) and/or Y86, Y87, and/or Y192 of the light chain (SEQ ID NO:62). In other embodiments, the anti-IL6R HuPTM mAb or antigen-binding fragment thereof does not contain any detectable NeuGc moieties and/or does not contain any detectable alpha-Gal moieties. In certain embodiments, the HuPTM mAb is a full length or substantially full length mAb with an Fc region.

[1078] In specific embodiments, the anti-IL6R HuPTM mAb or antigen-binding fragment thereof has heavy and light chains with the amino acid sequences of the heavy and light chain Fab portions of tocilizumab as set forth in FIG. 16H (with glutamine (Q) glycosylation sites; asparaginal (N) glycosylation sites, non-consensus asparaginal (N) glycosylation sites; and tyrosine-O-sulfation sites (Y) are as indicated in the legend) has a glycosylation, particularly a 2,6-sialylation, at one or more of the amino acid positions N61, N77, and/or N161 of the heavy chain (SEQ ID NO: 341) or Q100, N158, and/or N210 of the light chain (SEQ ID NO: 342). Alternatively or in addition to, the HuPTM mAb or antigen binding-fragment thereof with the heavy and light chain variable domain sequences of satralizumab has a sulfation group at Y94 and/or Y95 of the heavy chain (SEQ ID NO: 341) and/or Y86 and/or Y87 of the light chain (SEQ ID NO: 342). In other embodiments, the anti-IL6R HuPTM mAb or antigen-binding fragment thereof does not contain any detectable NeuGc moieties and/or does not contain any detectable alpha-Gal moieties. In certain embodiments, the HuPTM mAb is a full length or substantially full length mAb with an Fc region.

[1079] In specific embodiments, the anti-IL6 HuPTM mAb or antigen-binding fragment thereof has heavy and light chains with the amino acid sequences of the heavy and light chain Fab portions of siltuximab as set forth in FIG. 16C (with glutamine (Q) glycosylation sites; asparaginal (N) glycosylation sites, non-consensus asparaginal (N) glycosylation sites; and tyrosine-O-sulfation sites (Y) are as indicated in the legend) has a glycosylation, particularly a 2,6-sialylation, at one or more of the amino acid positions Q111 and/or N161 of the heavy chain (SEQ ID NO: 331) or N60, N157, and/or N209 of the light chain (SEQ ID NO: 332). Alternatively or in addition to, the HuPTM mAb or antigen binding-fragment thereof with the heavy and light chain variable domain sequences of siltuximab has a sulfation group at Y94 and/or Y95 of the heavy chain (SEQ ID NO: 331) and/or Y85 and/or Y86 of the light chain (SEQ ID NO: 332). In other embodiments, the anti-IL6 HuPTM mAb or antigen-binding fragment thereof does not contain any detectable NeuGc moieties and/or does not contain any detectable alpha-Gal moieties. In certain embodiments, the HuPTM mAb is a full length or substantially full length mAb with an Fc region.

[1080] In specific embodiments, the anti-IL6 HuPTM mAb or antigen-binding fragment thereof has heavy and light chains with the amino acid sequences of the heavy and light chain Fab portions of clazakizumab as set forth in FIG. 16D (with glutamine (Q) glycosylation sites; asparaginal (N) glycosylation sites, non-consensus asparaginal (N) glycosylation sites; and tyrosine-O-sulfation sites (Y) are as indicated in the legend) has a glycosylation, particularly a 2,6-sialylation, at one or more of the amino acid positions N76, Q112, and/or N162 of the heavy chain (SEQ ID NO: 333) or N30, N161, and/or N213 of the light chain (SEQ ID NO: 334). Alternatively or in addition to, the HuPTM mAb or antigen binding-fragment thereof with the heavy and light chain variable domain sequences of clazakizumab has a sulfation group at Y93 and/or Y94 of the heavy chain (SEQ ID NO: 333) and/or Y86 and/or Y87 of the light chain (SEQ ID NO: 334). In other embodiments, the anti-IL6 HuPTM mAb or antigen-binding fragment thereof does not contain any detectable NeuGc moieties and/or does not contain any detectable alpha-Gal moieties. In certain embodiments, the HuPTM mAb is a full length or substantially full length mAb with an Fc region.

[1081] In specific embodiments, the anti-IL6 HuPTM mAb or antigen-binding fragment thereof has heavy and light chains with the amino acid sequences of the heavy and light chain Fab portions of sirukumab as set forth in FIG. 16E (with glutamine (Q) glycosylation sites; asparaginal (N) glycosylation sites, non-consensus asparaginal (N) glycosylation sites; and tyrosine-O-sulfation sites (Y) are as indicated in the legend) has a glycosylation, particularly a 2,6-sialylation, at one or more of the amino acid positions Q111 and/or N161 of the heavy chain (SEQ ID NO: 335) or N157 and/or N209 of the light chain (SEQ ID NO: 336). Alternatively or in addition to, the HuPTM mAb or antigen binding-fragment thereof with the heavy and light chain variable domain sequences of sirukumab has a sulfation group at Y94 and/or Y95 of the heavy chain (SEQ ID NO: 335) and/or Y85 and/or Y86 of the light chain (SEQ ID NO: 336). In other embodiments, the anti-IL6 HuPTM mAb or antigen-binding fragment thereof does not contain any detectable NeuGc moieties and/or does not contain any detectable alpha-Gal moieties. In certain embodiments, the HuPTM mAb is a full length or substantially full length mAb with an Fc region.

[1082] In specific embodiments, the anti-IL6 HuPTM mAb or antigen-binding fragment thereof has heavy and light chains with the amino acid sequences of the heavy and light chain Fab portions of olokizumab as set forth in FIG. 16F (with glutamine (Q) glycosylation sites; asparaginal (N) glycosylation sites, non-consensus asparaginal (N) glycosylation sites; and tyrosine-O-sulfation sites (Y) are as indicated in the legend) has a glycosylation, particularly a 2,6-sialylation, at one or more of the amino acid positions N79, Q112, N162, and/or N204 of the heavy chain (SEQ ID NO: 337) or Q100, N158 and/or N210 of the light chain (SEQ ID NO: 338). Alternatively or in addition to, the HuPTM mAb or antigen binding-fragment thereof with the heavy and light chain variable domain sequences of olokizumab has a sulfation group at Y96 and/or Y97 of the heavy chain (SEQ ID NO: 337) and/or Y86 and/or Y87 of the light chain (SEQ ID NO: 338). In other embodiments, the anti-IL6 HuPTM mAb or antigen-binding fragment thereof does not contain any detectable NeuGc moieties and/or does not contain any detectable alpha-Gal moieties. In certain embodiments, the HuPTM mAb is a full length or substantially full length mAb with an Fc region.

[1083] In specific embodiments, the anti-IL6 HuPTM mAb or antigen-binding fragment thereof has heavy and light chains with the amino acid sequences of the heavy and light chain Fab portions of gerilimzumab as set forth in FIG. 16G (with glutamine (Q) glycosylation sites; asparaginal (N) glycosylation sites, non-consensus asparaginal (N) glycosylation sites; and tyrosine-O-sulfation sites (Y) are as indicated in the legend) has a glycosylation, particularly a 2,6-sialylation, at one or more of the amino acid positions N78, Q114, N164 of the heavy chain (SEQ ID NO: 339) or N71 and/or N174 of the light chain (SEQ ID NO: 340). Alternatively or in addition to, the HuPTM mAb or antigen binding-fragment thereof with the heavy and light chain variable domain sequences of gerilimzumab has a sulfation group at Y95 and/or Y96 of the heavy chain (SEQ ID NO: 339) and/or Y88 and/or Y89 of the light chain (SEQ ID NO: 340). In other embodiments, the anti-IL6 HuPTM mAb or antigen-binding fragment thereof does not contain any detectable NeuGc moieties and/or does not contain any detectable alpha-Gal moieties. In certain embodiments, the HuPTM mAb is a full length or substantially full length mAb with an Fc region.

[1084] In specific embodiments, the anti-CD19 HuPTM mAb or antigen-binding fragment thereof has heavy and light chains with the amino acid sequences of the heavy and light chain Fab portions of inebilizumab as set forth in FIG. 16I (with glutamine (Q) glycosylation sites; asparaginal (N) glycosylation sites, non-consensus asparaginal (N) glycosylation sites; and tyrosine-O-sulfation sites (Y) are as indicated in the legend) has a glycosylation, particularly a 2,6-sialylation, at one or more of the amino acid positions N77, Q113, and/or N163 of the heavy chain (SEQ ID NO:63) or N80, N162, and/or N214 of the light chain (SEQ ID NO:64). Alternatively or in addition to, the HuPTM mAb or antigen binding-fragment thereof with the heavy and light chain variable domain sequences of inebilizumab has a sulfation group at Y94, and/or Y95 of the heavy chain (SEQ ID NO:63) and/or Y90 and/or Y91 of the light chain (SEQ ID NO:64). In other embodiments, the anti-CD19 HuPTM mAb or antigen-binding fragment thereof does not contain any detectable NeuGc moieties and/or does not contain any detectable alpha-Gal moieties. In certain embodiments, the HuPTM mAb is a full length or substantially full length mAb with an Fc region.

[1085] In certain embodiments, the HuPTM mAb or Fab is therapeutically effective and is at least 0.5%, 1% or 2% glycosylated and/or sulfated and may be at least 5%, 10% or even 50% or 100% glycosylated and/or sulfated. The goal of gene therapy treatment provided herein is to slow or arrest the progression of or relieve one or more symptoms of one or more ocular disorders. In the case of non-infectious uveitis, efficacy may be monitored by measuring a reduction in pain, redness, and/or photophobia and/or an improvement in vision from baseline. In the case of NMO, efficacy may be monitored by measuring an improvement in vision and sensation and/or reduction of weakness or paralysis in the legs or arms, painful spasms, and/or uncontrollable vomiting and hiccups. In the case of non-infectious uveitis, efficacy may be monitored by monitoring vision acuity, redness of the eye, sensitivity to light, and/or eye pain. For example, efficacy can be monitored by assessing change in vision acuity, redness of the eye, sensitivity to light, and/or eye pain from baseline. In the case of DR and DME, efficacy may be monitored by monitoring vision acuity. For example, efficacy can be monitored by assessing change in vision acuity from baseline.

[1086] Alternatively, the goal of the gene therapy is to reduce, inhibit or ameliorate a detrimental immune response in a human subject, such as a subject suffering from a viral or bacterial infection, including infection by SARS-coV-2 or COVID19 or in need of management of side effects from immunotherapy, such as being administered an immune-oncology agent and/or a cell based immune therapy such as a CAR-T cell therapy. Symptoms of a detrimental immune response, including a cytokine release syndrome, include high fever, inflammation, severe fatigue, nausea, and may lead to tissue or organ damage, including multiple organ failure.

[1087] Combinations of delivery of the anti-IL6R, anti-IL6, or anti-CD19 HuPTM mAb or antigen-binding fragment thereof, to the liver or muscles accompanied by delivery of other available treatments are encompassed by the methods provided herein. The additional treatments may be administered before, concurrently, or subsequent to the gene therapy treatment. Available treatments for a subject with non-infectious uveitis that could be combined with the gene therapy provided herein include but are not limited to, azathioprine, methotrexate, mycophenolate mofetil, cyclosporine, cyclophosphamide, corticosteroids (local and/or systemic), and others and administration with anti-IL6R or anti-IL6, including but not limited to sarilumab, satralizumab, tocilizumab, siltuximab, clazakizumab, sirukumab, olokizumab, or gerilimzumab. Available treatments for a subject with NMO that could be combined with the gene therapy provided herein include but are not limited to, azathioprine (IMRUN®, AZASAN®), methotrexate, mycophenolate mofetil (CELLCEPT®), rituximab (RITUXAN®), corticosteroids (local and/or systemic), and others and administration with anti-IL6R, anti-IL6, or anti-CD19 agents, including but not limited to satralizumab, sarilumab, tocilizumab, siltuximab, clazakizumab, sirukumab, olokizumab, gerilimzumab, or inebilizumab. Available treatments for DR or DME that could be combined with the gene therapy provided herein include but are not limited to laser photocoagulation, photodynamic therapy with verteporfin, aflibercept, and/or intravitreal steroids, anti-VEGF agents, and others and administration with anti-IL6R agents or anti-CD19 agents, including but not limited to sarilumab, satralizumab, tocilizumab, siltuximab, clazakizumab, sirukumab, olokizumab, gerilimzumab, or inebilizumab.

### 5.3.16 Anti-Integrin (β7 Subunit) HuPTM Constructs and Formulations for Crohn's Disease and Ulcerative Colitis

[1088] Compositions and methods are described for the delivery of HuPTM mAbs and antigen-binding fragments thereof, such as HuPTM Fabs, that bind to integrin 137 subunit (ITGB7) indicated for treating inflammatory bowel disease (IBD) (e.g., UC and CD). In certain embodiments, the HuPTM mAb has the amino acid sequence of etrolizumab or an antigen binding fragment thereof. The amino acid sequence of Fab fragments of etrolizumab is provided in FIG. 17. Delivery may be accomplished via gene therapy—e.g., by administering a viral vector or other DNA expression construct encoding an ITGB7-binding HuPTM mAb (or an antigen binding fragment and/or a hyperglycosylated derivative or other derivative, thereof) to patients (human subjects) diagnosed with, or having one or more symptoms of IBD (e.g., UC or CD) to create a permanent depot that continuously supplies the human PTM, e.g., human-glycosylated, transgene product.

[1089] Transgenes

[1090] Provided are recombinant vectors containing a transgene encoding a HuPTM mAb or HuPTM Fab (or other antigen binding fragment of the HuPTM mAb) that binds to ITGB7 that can be administered to deliver the HuPTM mAb or antigen binding fragment in a patient. The transgene is a nucleic acid comprising the nucleotide sequences encoding an antigen binding fragment of an antibody that binds to ITGB7, such as etrolizumab, or variants thereof as detailed herein. The transgene may also encode an anti-ITGB7 antigen binding fragment that contains additional glycosylation sites (e.g., see Courtois et al.).

[1091] In certain embodiments, the anti-ITGB7 antigen-binding fragment transgene comprises the nucleotide sequences encoding the heavy and light chains of the Fab portion of etrolizumab (having amino acid sequences of SEQ ID NOs. 65 and 66, respectively, see Table 5 and FIG. 17). The nucleotide sequences may be codon optimized for expression in human cells. Nucleotide sequences may, for example, comprise the nucleotide sequences of SEQ ID NO: 135 (encoding the etrolizumab heavy chain Fab portion) and SEQ ID NO: 136 (encoding the etrolizumab light chain Fab portion) as set forth in Table 6. The heavy and light chain sequences both have a signal or leader sequence at the N-terminus appropriate for expression and secretion in human cells, in particular, human liver cells (e.g., hepatocytes) or muscle cells. The signal sequence may have the amino acid sequence of MYRMQLLLLIALSLALVTNS (SEQ ID NO: 146). Alternatively, the signal sequence may have an amino acid sequence selected from any one of the signal sequences set forth in Table 3 or 4 that correspond to the proteins secreted by myocytes or hepatocytes, respectively.

[1092] In addition to the heavy and light chain variable domain and C_{H}1 and C_{L} domain sequences, the transgenes may comprise, at the C-terminus of the heavy chain C_{H}1 domain sequence, all or a portion of the hinge region. In specific embodiments, the anti-ITGB7 antigen binding domain has a heavy chain variable domain of SEQ ID NO: 65 with additional hinge region sequence starting after the C-terminal valine (V), contains all or a portion of the amino acid sequence EPKSCDKTHTCPPCPAPELLGG (SEQ ID NO: 194), and specifically, EPKSCDKTHL (SEQ ID NO: 196), EPKSCDKTHT (SEQ ID NO: 197), EPKSCDKTHTCPPCPA (SEQ ID NO: 198), EPKSCDKTHLCPPCPA (SEQ ID NO: 199), EPKSCDKTHTCPPCPAPELLGGPSVFL (SEQ ID NO: 200) or EPKSCDKTHLCPPCPAPELLGGPSVFL (SEQ ID NO: 201) as set forth in FIG. 17. These hinge regions may be encoded by nucleotide sequences at the 3′ end of SEQ ID NO: 135 by the hinge region encoding sequences set forth in Table 6 (SEQ ID NO: 135). In another embodiment, the transgenes comprise the amino acid sequences encoding the full length (or substantially full length) heavy and light chains of the antibody, comprising the Fc domain at the C terminus of the heavy chain, e.g., having an amino acid sequence of SEQ ID NO: 311 (Table 7) or an IgG1 Fc domain, such as SEQ ID No. 283 or as depicted in FIG. 23, or a mutant or variant thereof. The Fc domain may be engineered for altered binding to one or more Fc receptors and/or effector function as disclosed in Section 5.1.9, infra.

[1093] In certain embodiments, the anti-ITGB7 antigen-binding fragment transgene encodes an ITGB7 antigen-binding fragment comprising a light chain comprising an amino acid sequence that is at least 85%, 86%, 87%, 88%, 89%, 90%, 91%, 92%, 93%, 94%, 95%, 96%, 97%, 98% or 99% identical to the sequence set forth in SEQ ID NO: 66. In certain embodiments, the anti-ITGB7 antigen-binding fragment transgene encodes an ITGB7 antigen-binding fragment comprising a heavy chain comprising an amino acid sequence that is at least 85%, 86%, 87%, 88%, 89%, 90%, 91%, 92%, 93%, 94%, 95%, 96%, 97%, 98% or 99% identical to the sequence set forth in SEQ ID NO: 65. In certain embodiments, the anti-ITGB7 antigen-binding fragment transgene encodes an antigen-binding fragment comprising a light chain comprising an amino acid sequence that is at least 85%, 86%, 87%, 88%, 89%, 90%, 91%, 92%, 93%, 94%, 95%, 96%, 97%, 98% or 99% identical to the sequence set forth in SEQ ID NO: 66 and a heavy chain comprising an amino acid sequence that is at least 85%, 86%, 87%, 88%, 89%, 90%, 91%, 92%, 93%, 94%, 95%, 96%, 97%, 98% or 99% identical to the sequence set forth in SEQ ID NO: 65. In specific embodiments, the ITGB7 antigen binding fragment comprises a heavy chain comprising an amino acid sequence of SEQ ID NO: 65 with 1, 2, 3, 4, 5, 6, 7, 8, 9, 10, 11, 12, 13, 14, 15 or more amino acid substitutions, insertions or deletions, and the substitutions, insertions or deletions are made, e.g., in the framework regions (e.g., those regions outside of the CDRs, which CDRs are underlined in FIG. 17) or are substitutions with an amino acid present at that position in the heavy chain of one or more of the other therapeutic antibodies, for example, as identified by the alignment in FIG. 20A. In specific embodiments, the ITGB7 antigen binding fragment comprises a light chain comprising an amino acid sequence of SEQ ID NO: 66 with 1, 2, 3, 4, 5, 6, 7, 8, 9, 10, 11, 12, 13, 14, 15 or more amino acid substitutions, insertions or deletions, and the substitutions, insertions or deletions are made, e.g., in the framework regions (e.g., those regions outside of the CDRs, which CDRs are underlined in FIG. 17) or are substitutions with an amino acid present at that position in the light chain of one or more of the other therapeutic antibodies, for example, as identified by the alignment in FIG. 20B.

[1094] In certain embodiments, the anti-ITGB7 antigen-binding fragment transgene encodes a hyperglycosylated etrolizumab Fab, comprising a heavy chain and a light chain of SEQ ID NOs: 65 and 66, respectively, with one or more of the following mutations: L112N (heavy chain), Q160N or Q160S (light chain), and/or E195N (light chain) (see FIGS. 20A (heavy chain) and 20B (light chain)).

[1095] In certain embodiments, the anti-ITGB7 antigen-binding fragment transgene encodes an antigen-binding fragment and comprises the nucleotide sequences encoding the six etrolizumab CDRs which are underlined in the heavy and light chain variable domain sequences of FIG. 17 which are spaced between framework regions, generally human framework regions, and associated with constant domains depending upon the form of the antigen-binding molecule, as is known in the art to form the heavy and/or light chain variable domain of an anti-ITGB7 antibody or antigen-binding fragment thereof.

[1096] Gene Therapy Methods

[1097] Provided are methods of treating human subjects for IBD by administration of a viral vector containing a transgene encoding an anti-ITGB7 antibody or antigen binding fragment thereof. The antibody may be etrolizumab and is, e.g., a full length or substantially full length antibody or Fab fragment thereof, or other antigen-binding fragment thereof. In embodiments, the patient has been diagnosed with and/or has symptoms associated with one or more of IBD.

[1098] Recombinant vector used for delivering the transgene are described in Section 5.4.3. Recombinant vectors used for delivering the transgene are described in Section 5.4.2. Such vectors should have a tropism for human liver cells and can include non-replicating rAAV, particularly those bearing an AAV8 or AAV9 capsid. The recombinant vectors, such as those shown in FIG. 17, can be administered in any manner such that the recombinant vector enters the liver, e.g., by introducing the recombinant vector into the bloodstream. See Section 5.5.2 for details regarding the methods of treatment.

[1099] Subjects to whom such gene therapy is administered can be those responsive to anti-ITGB7 therapy. In certain embodiments, the methods encompass treating patients who have been diagnosed with IBD, or have one or more symptoms associated therewith, and identified as responsive to treatment with an anti-ITGB7 antibody, or considered a good candidate for therapy with an anti-ITGB7 antibody. In specific embodiments, the patients have previously been treated with etrolizumab, and have been found to be responsive to etrolizumab. To determine responsiveness, the anti-ITGB7 or antigen-binding fragment transgene product (e.g., produced in cell culture, bioreactors, etc.) may be administered directly to the subject.

[1100] Human Post Translationally Modified Antibodies

[1101] The production of the anti-ITGB7 HuPTM mAb or HuPTM Fab, should result in a “biobetter” molecule for the treatment of IBD accomplished via gene therapy—e.g., by administering a viral vector or other DNA expression construct encoding the anti-ITGB7 HuPTM Fab, subcutaneously, intramuscularly, or intravenously to human subjects (patients) diagnosed with IBD, to create a permanent depot in the muscle or liver that continuously supplies the fully-human post-translationally modified, e.g., human-glycosylated, sulfated transgene product produced by transduced cells of the muscle or liver.

[1102] The cDNA construct for the anti-ITGB7 HuPTMmAb or anti-ITGB7 HuPTM Fab should include a signal peptide that ensures proper co- and post-translational processing (glycosylation and protein sulfation) by the transduced cells of the muscle or liver. For example, the signal sequence may be MYRMQLLLLIALSLALVTNS (SEQ ID NO: 146). Alternatively, the signal sequence may have an amino acid sequence selected from any one of the signal sequences set forth in Table 3 or 4 that correspond to the proteins secreted by cells of the muscle or liver, respectively.

[1103] As an alternative, or an additional treatment to gene therapy, the anti-ITGB7 HuPTM mAb or HuPTM Fab can be produced in human cell lines by recombinant DNA technology and administered to patients diagnosed with a retinal disorder or cancer for whom therapy for IBD is considered appropriate.

[1104] In specific embodiments, the anti-ITGB7 HuPTM mAb or antigen-binding fragment thereof has heavy and light chains with the amino acid sequences of the heavy and light chain Fab portions of etrolizumab as set forth in FIG. 17 (with glutamine (Q) glycosylation sites; asparaginal (N) glycosylation sites, non-consensus asparaginal (N) glycosylation sites; and tyrosine-O-sulfation sites (Y) are as indicated in the legend) has a glycosylation, particularly a 2,6-sialylation, at one or more of the amino acid positions N60, N76, Q109, and/or N159 of the heavy chain (SEQ ID NO: 65) or Q100, N158, and/or N210 of the light chain (SEQ ID NO: 66). Alternatively or in addition to, the HuPTM mAb or antigen binding-fragment thereof with the heavy and light chain variable domain sequences of etrolizumab has a sulfation group at Y93 and/or Y94 of the heavy chain (SEQ ID NO: 65) and/or Y36, Y86, and/or Y87 of the light chain (SEQ ID NO: 66). In other embodiments, the anti-ITGB7 HuPTM mAb or antigen-binding fragment thereof does not contain detectable NeuGc moieties and/or does not contain detectable alpha-Gal moieties. In certain embodiments, the HuPTM mAb is a full length or substantially full length mAb with an Fc region.

[1105] In certain embodiments, the HuPTM mAb or Fab is therapeutically effective and is at least 0.5%, 1% or 2% glycosylated and/or sulfated and may be at least 5%, 10% or even 50% or 100% glycosylated and/or sulfated. The goal of gene therapy treatment provided herein is to slow or arrest the progression of the disease being treated or alleviate one or more symptoms thereof. With regard to CD, efficacy can be monitored by assessing Crohn's Disease Activity Index [CDAI] over the course of treatment (e.g., see Best W R et al. (1976) Gastroenterology, March; 70(3):439-44, “Development of a Crohn's disease activity index. National Cooperative Crohn's Disease Study.”). With regard to UC, efficacy can be monitored by assessing a Mayo score and an endoscopy subscore over the course of treatment (e.g., see Lobaton et al., “The Modified Mayo Endoscopic Score (MMES): A New Index for the Assessment of Extension and Severity of Endoscopic Activity in Ulcerative Colitis Patients,” J. Crohns Colitis. 2015 October: 9(10):846-52.

[1106] Combinations of delivery of the anti-ITGB7 HuPTM mAb or antigen-binding fragment thereof to the muscle or liver accompanied by delivery of other available treatments are encompassed by the methods provided herein. The additional treatments may be administered before, concurrently, or subsequent to the gene therapy treatment. Available treatments for IBD that could be combined with the gene therapy provided herein include but are not limited to nonsteroidal anti-inflammatory drugs (e.g., mesalamine, sulfasalazine), steroids (e.g., hydrocortisone, prednisone, budesonide), immunosuppressants (e.g., methotrexate, mercaptopurine, azathioprine), vitamins (e.g., iron, cholecalciferol), antibiotics (e.g., amino salicylic acid, metronidazole), other antibodies (e.g., infliximab, adalimumab) and administration with anti-ITGB7, including but not limited to etrolizumab.

### 5.3.17. Anti-Sclerostin HuPTM Constructs and Formulations for Osteoporosis

[1107] Compositions and methods are described for the delivery of HuPTM mAbs and antigen-binding fragments thereof, such as HuPTM Fabs, that bind to sclerostin (SOST) derived from anti-SOST antibody, such as romosozumab (FIG. 18), and indicated for treating osteoporosis or abnormal bone loss or weakness (e.g., treating giant cell tumor of bone, treating treatment-induced bone loss, slowing the loss of (or increasing) bone mass in breast and prostate cancer patients, preventing skeletal-related events due to bone metastasis or for decreasing bone resorption and turnover. In certain embodiments, the HuPTM mAb has the amino acid sequence of romosozumab or an antigen binding fragment thereof. The amino acid sequence of Fab fragment of this antibody is provided in FIG. 18. Delivery may be accomplished via gene therapy—e.g., by administering a viral vector or other DNA expression construct encoding an SOST-binding HuPTM mAb (or an antigen binding fragment and/or a hyperglycosylated derivative or other derivative, thereof) to patients (human subjects) diagnosed with osteoporosis or suffering bone loss to create a permanent depot that continuously supplies the human PTM, e.g., human-glycosylated, transgene product.

[1108] Transgenes

[1109] Provided are recombinant vectors containing a transgene encoding a HuPTM mAb or HuPTM Fab (or other antigen binding fragment of the HuPTM mAb) that binds to SOST that can be administered to deliver the HuPTM mAb or antigen binding fragment in a patient. The transgene is a nucleic acid comprising the nucleotide sequences encoding an antigen binding fragment of an antibody that binds to SOST, such as romosozumab or variants thereof as detailed herein. The transgene may also encode an anti-SOST antigen binding fragment that contains additional glycosylation sites (e.g., see Courtois et al.).

[1110] In certain embodiments, the anti-SOST antigen-binding fragment transgene comprises the nucleotide sequences encoding the heavy and light chains of the Fab portion of romosozumab (having amino acid sequences of SEQ ID NOs. 67 and 68, respectively, see Table 5 and FIG. 18). The nucleotide sequences may be codon optimized for expression in human cells. Nucleotide sequences may, for example, comprise the nucleotide sequences of SEQ ID NO: 137 (encoding the heavy chain Fab portion) and SEQ ID NO: 138 (encoding the romosozumab light chain Fab portion) as set forth in Table 6. The heavy and light chain sequences both have a signal or leader sequence at the N-terminus appropriate for expression and secretion in human cells, in particular, human liver cells (e.g., hepatocytes) or muscle cells. The signal sequence may have the amino acid sequence of MYRMQLLLLIALSLALVTNS (SEQ ID NO: 146). Alternatively, the signal sequence may have an amino acid sequence selected from any one of the signal sequences set forth in Table 3 or 4 that correspond to the proteins secreted by myocytes or hepatocytes, respectively.

[1111] In addition to the heavy and light chain variable domain and C_{H}1 and C_{L} domain sequences, the transgenes may comprise, at the C-terminus of the heavy chain C_{H}1 domain sequence, all or a portion of the hinge region. In specific embodiments, the anti-SOST-antigen binding domain has a heavy chain Fab domain of SEQ ID NO: 67 with additional hinge region sequence starting after the C-terminal valine (V), contains all or a portion of the amino acid sequence contains all or a portion of the amino acid sequence ERKCCVECPPCPAPPVAG (SEQ ID NO: 220) or ERKCCVECPPCPA (SEQ ID NO: 221) as set forth in FIG. 18. These hinge regions may be encoded by nucleotide sequences at the 3′ end of SEQ ID NO: 137 by the hinge region encoding sequences set forth in Table 6 (SEQ ID NO: 137). In another embodiment, the transgenes comprise the amino acid sequences encoding the full length (or substantially full length) heavy and light chains of the antibody, comprising the Fc domain at the C terminus of the heavy chain, e.g having an amino acid sequence of SEQ ID NO: 313 (Table 7) or an IgG2 Fc domain, such as SEQ ID No. 284 or as depicted in FIG. 23, or a mutant or variant thereof. The Fc domain may be engineered for altered binding to one or more Fc receptors and/or effector function as disclosed in Section 5.1.9, infra.

[1112] In certain embodiments, the anti-SOST antigen-binding fragment transgene encodes an SOST antigen-binding fragment comprising a light chain comprising an amino acid sequence that is at least 85%, 86%, 87%, 88%, 89%, 90%, 91%, 92%, 93%, 94%, 95%, 96%, 97%, 98% or 99% identical to the sequence set forth in SEQ ID NO: 68. In certain embodiments, the anti-SOST antigen-binding fragment transgene encodes an SOST antigen-binding fragment comprising a heavy chain comprising an amino acid sequence that is at least 85%, 86%, 87%, 88%, 89%, 90%, 91%, 92%, 93%, 94%, 95%, 96%, 97%, 98% or 99% identical to the sequence set forth in SEQ ID NO: 67. In certain embodiments, the anti-SOST antigen-binding fragment transgene encodes an antigen-binding fragment comprising a light chain comprising an amino acid sequence that is at least 85%, 86%, 87%, 88%, 89%, 90%, 91%, 92%, 93%, 94%, 95%, 96%, 97%, 98% or 99% identical to the sequence set forth in SEQ ID NO: 68 and a heavy chain comprising an amino acid sequence that is at least 85%, 86%, 87%, 88%, 89%, 90%, 91%, 92%, 93%, 94%, 95%, 96%, 97%, 98% or 99% identical to the sequence set forth in SEQ ID NO: 67. In specific embodiments, the SOST antigen binding fragment comprises a heavy chain comprising an amino acid sequence of SEQ ID NO: 67 with 1, 2, 3, 4, 5, 6, 7, 8, 9, 10, 11, 12, 13, 14, 15 or more amino acid substitutions, insertions or deletions, and the substitutions, insertions or deletions are made, e.g., in the framework regions (e.g., those regions outside of the CDRs, which CDRs are underlined in FIG. 18) or are substitutions with an amino acid present at that position in the heavy chain of one or more of the other therapeutic antibodies, for example, as identified by the alignment in FIG. 20A. In specific embodiments, the SOST antigen binding fragment comprises a light chain comprising an amino acid sequence of SEQ ID NO: 68 with 1, 2, 3, 4, 5, 6, 7, 8, 9, 10, 11, 12, 13, 14, 15 or more amino acid substitutions, insertions or deletions, and the substitutions, insertions or deletions are made, e.g., in the framework regions (e.g., those regions outside of the CDRs, which CDRs are underlined in FIG. 18) or are substitutions with an amino acid present at that position in the light chain of one or more of the other therapeutic antibodies, for example, as identified by the alignment in FIG. 20B.

[1113] In certain embodiments, the anti-SOST antigen-binding fragment transgene encodes a hyperglycosylated romosozumab Fab, comprising a heavy chain and a light chain of SEQ ID NOs: 67 and 68, respectively, with one or more of the following mutations: T118N (heavy chain), Q160N or Q160S (light chain), and/or E195N (light chain) (see FIG. 20A (heavy chain) and B (light chain)).

[1114] In certain embodiments, the anti-SOST antigen-binding fragment transgene encodes an antigen-binding fragment and comprises the nucleotide sequences encoding the six romosozumab CDRs which are underlined in the heavy and light chain variable domain sequences of FIG. 18 which are spaced between framework regions, generally human framework regions, and associated with constant domains depending upon the form of the antigen-binding molecule, as is known in the art to form the heavy and/or light chain variable domain of an anti-SOST antibody or antigen-binding fragment thereof.

[1115] Gene Therapy Methods

[1116] Provided are methods of treating human subjects for osteoporosis or abnormal bone loss (for example, in breast or prostate cancer patients or due to bone metastases) by administration of a viral vector containing a transgene encoding an anti-SOST antibody, or antigen binding fragment thereof. The antibody may be romosozumab, and is e.g. a full length or substantially full length antibody or Fab fragment thereof, or other antigen-binding fragment thereof. In embodiments, the patient has been diagnosed with and/or has symptoms associated with osteoporosis or abnormal bone loss. Recombinant vectors used for delivering the transgene are described in Section 5.4.2. Such vectors should have a tropism for human liver or muscle cells and can include non-replicating rAAV, particularly those bearing an AAV8 or AAV9 capsid. The recombinant vector, such as shown in FIG. 18, can be administered in any manner such that the recombinant vector enters the liver or muscle tissue, e.g., by introducing the recombinant vector into the bloodstream. See Section 5.5.2 for details regarding the methods of treatment.

[1117] Subjects to whom such gene therapy is administered can be those responsive to anti-SOST therapy. In certain embodiments, the methods encompass treating patients who have been diagnosed with osteoporosis or abnormal bone loss, or have one or more symptoms associated therewith, and identified as responsive to treatment with an anti-SOST antibody or considered a good candidate for therapy with an anti-SOST antibody. In specific embodiments, the patients have previously been treated with romosozumab, and have been found to be responsive to romosozumab. To determine responsiveness, the anti-SOST antibody or antigen-binding fragment transgene product (e.g., produced in cell culture, bioreactors, etc.) may be administered directly to the subject.

[1118] Human Post Translationally Modified Antibodies

[1119] The production of the anti-SOST HuPTM mAb or HuPTM Fab, should result in a “biobetter” molecule for the treatment of osteoporosis or bone loss accomplished via gene therapy—e.g., by administering a viral vector or other DNA expression construct encoding the anti-SOST HuPTM Fab, intravenously to human subjects (patients) diagnosed with or having one or more symptoms of osteoporosis or bone loss, to create a permanent depot in the liver or muscle tissue that continuously supplies the fully-human post-translationally modified, e.g., human-glycosylated, sulfated transgene product produced by transduced liver or muscle cells.

[1120] The cDNA construct for the anti-SOST HuPTMmAb or anti-SOST HuPTM Fab should include a signal peptide that ensures proper co- and post-translational processing (glycosylation and protein sulfation) by the transduced liver or muscle cells. For example, the signal sequence may be MYRMQLLLLIALSLALVTNS (SEQ ID NO: 146). Alternatively, the signal sequence may have an amino acid sequence selected from any one of the signal sequences set forth in Table 3 or 4 that correspond to the proteins secreted by myocytes or hepatocytes, respectively.

[1121] As an alternative, or an additional treatment to gene therapy, the anti-SOST HuPTM mAb or HuPTM Fab can be produced in human cell lines by recombinant DNA technology, and administered to patients diagnosed with osteoporosis or bone loss, or for whom therapy for osteoporosis or bone loss is considered appropriate.

[1122] In specific embodiments, the anti-SOST HuPTM mAb or antigen-binding fragment thereof has heavy and light chains with the amino acid sequences of the heavy and light chain Fab portions of romosozumab as set forth in FIG. 18 (with glutamine (Q) glycosylation sites; asparaginal (N) glycosylation sites, non-consensus asparaginal (N) glycosylation sites; and tyrosine-O-sulfation sites (Y) are as indicated in the legend) has a glycosylation, particularly a 2,6-sialylation, at one or more of the amino acid positions Q115, N165, N198, and/or N207 of the heavy chain (SEQ ID NO:67) or N158 and/or N210 of the light chain (SEQ ID NO:68). Alternatively or in addition to, the HuPTM mAb or antigen binding-fragment thereof with the heavy and light chain variable domain sequences of romosozumab has a sulfation group at Y94 and/or Y204 of the heavy chain (SEQ ID NO: 67) and/or Y86 and/or Y87 of the light chain (SEQ ID NO: 68). In other embodiments, the anti-SOST HuPTM mAb or antigen-binding fragment thereof does not contain detectable NeuGc moieties and/or does not contain detectable alpha-Gal moieties. In certain embodiments, the HuPTM mAb is a full length or substantially full length mAb with an Fc region.

[1123] In certain embodiments, the HuPTM mAb or Fab is therapeutically effective and is at least 0.5%, 1% or 2% glycosylated and/or sulfated and may be at least 5%, 10% or even 50% or 100% glycosylated and/or sulfated. The goal of gene therapy treatment provided herein is to slow or arrest the progression of osteoporosis or bone loss. Efficacy may be monitored by evaluating bone tissue or skeletal events or the lack of skeletal events. For example, with regard to osteoporosis, efficacy can be monitored by a bone mineral content assessment, assessment of radiographs for vertebral fractures, or diagnostic imaging for clinical fractures confirmation.

[1124] Combinations of delivery of the anti-SOST HuPTM mAb or antigen-binding fragment thereof, to the liver or muscles accompanied by delivery of other available treatments are encompassed by the methods provided herein. The additional treatments may be administered before, concurrently, or subsequent to the gene therapy treatment. Available treatments for osteoporosis or bone loss that could be combined with the gene therapy provided herein include but are not limited to bisphosphonates (e.g., zoledronic acid), parathyroid hormone (e.g., teriparatide [PTH 1-34] and/or full-length PTH 1-84), calcium, vitamin D, anti-RANKL agents, and chemotherapy, cryotherapy, or radiotherapy in patients diagnosed with cancer, and administration with anti-SOST agents, including but not limited to romosozumab.

### 5.3.18. Anti-pKal HuPTM Constructs and Formulations for Angioedema and Diabetic Retinopathy

[1125] Compositions and methods are described for the delivery of HuPTM mAbs and antigen-binding fragments thereof, such as HuPTM Fabs, that bind to kallikrein (pKal), derived from an anti-pKal antibody and indicated for treating angioedema, such as hereditary angioedema. In other embodiments, compositions and methods are provided for treating diabetic retinopathy and diabetic macular edema. In certain embodiments, the HuPTM mAb has the amino acid sequence of lanadelumab or an antigen binding fragment thereof. The amino acid sequence of Fab fragment of this antibody is provided in FIG. 19. Delivery may be accomplished via gene therapy—e.g., by administering a viral vector or other DNA expression construct encoding an pKal-binding HuPTM mAb (or an antigen binding fragment and/or a hyperglycosylated derivative or other derivative, thereof) to patients (human subjects) diagnosed with angioedema or diabetic retinopathy and diabetic macular edema to create a permanent depot that continuously supplies the human PTM, e.g., human-glycosylated, transgene product.

[1126] Transgenes

[1127] Provided are recombinant vectors containing a transgene encoding a HuPTM mAb or HuPTM Fab (or other antigen binding fragment of the HuPTM mAb) that binds to pKal that can be administered to deliver the HuPTM mAb or antigen binding fragment in a patient. The transgene is a nucleic acid comprising the nucleotide sequences encoding an antigen binding fragment of an antibody that binds to pKal, such as lanadelumab or variants thereof as detailed herein. The transgene may also encode an anti-pKal antigen binding fragment that contains additional glycosylation sites (e.g., see Courtois et al.).

[1128] In certain embodiments, the anti-pKal antigen-binding fragment transgene comprises the nucleotide sequences encoding the heavy and light chains of the Fab portion of lanadelumab (having amino acid sequences of SEQ ID NOs. 69 and 70, respectively, see Table 5 and FIG. 19). The nucleotide sequences may be codon optimized for expression in human cells. Nucleotide sequences may, for example, comprise the nucleotide sequences of SEQ ID NO: 139 (encoding the lanadelumab heavy chain Fab portion) and SEQ ID NO: 140 (encoding the lanadelumab light chain Fab portion) as set forth in Table 6. The heavy and light chain sequences both have a signal or leader sequence at the N-terminus appropriate for expression and secretion in human cells, in particular, human liver cells (e.g., hepatocytes) or muscle cells. The signal sequence may have the amino acid sequence of MYRMQLLLLIALSLALVTNS (SEQ ID NO: 146). Alternatively, the signal sequence may have an amino acid sequence selected from any one of the signal sequences set forth in Table 3 or 4 that correspond to the proteins secreted by myocytes or hepatocytes, respectively. For diabetic retinopathy and diabetic macular edema indications, the signal sequence may direct expression and secretion in human ocular or retinal cells, for example, one of the signal sequences in Table 5.

[1129] In addition to the heavy and light chain variable domain and C_{H}1 and C_{L} domain sequences, the transgenes may comprise, at the C-terminus of the heavy chain C_{H}1 domain sequence, all or a portion of the hinge region. In specific embodiments, the anti-pKal-antigen binding domain has a heavy chain Fab domain of SEQ ID NO: 69 with additional hinge region sequence starting after the C-terminal valine (V), contains all or a portion of the amino acid sequence EPKSCDKTHTCPPCPAPELLGG (SEQ ID NO: 194), and specifically, EPKSCDKTHL (SEQ ID NO: 196), EPKSCDKTHT (SEQ ID NO: 197), EPKSCDKTHTCPPCPA (SEQ ID NO: 198), EPKSCDKTHLCPPCPA (SEQ ID NO: 199), EPKSCDKTHTCPPCPAPELLGGPSVFL (SEQ ID NO: 200) or EPKSCDKTHLCPPCPAPELLGGPSVFL (SEQ ID NO: 201) as set forth in FIG. 19. These hinge regions may be encoded by nucleotide sequences at the 3′ end of SEQ ID NO: 139 by the hinge region encoding sequences set forth in Table 6 (SEQ ID NO: 139). In another embodiment, the transgenes comprise the amino acid sequences encoding the full length (or substantially full length) heavy and light chains of the antibody, comprising the Fc domain at the C terminus of the heavy chain, e.g. having an amino acid sequence of SEQ ID NO: 314 (Table 7) or an IgG1 Fc domain, such as SEQ ID No. 283 or as depicted in FIG. 23, or a mutant or variant thereof. The Fc domain may be engineered for altered binding to one or more Fc receptors and/or effector function as disclosed in Section 5.1.9, infra.

[1130] In specific embodiments, provided are constructs encoding a full length lanadelumab, including the Fc domain, particularly nucleotide sequence L01, L02 or L03 (SEQ ID Nos: 141, 286 or 287, respectively) as described in Example 36 and Table 8, herein, which are codon optimized and, in the case of L02 and L03 depleted for CpG dimers. The transgene may also comprises a nucleotide sequence that encodes a signal peptide MYRMQLLLLIALSLALVTNS (SEQ ID NO: 146; for example at the N-terminal of the heavy and/or the light chain) which may be encoded by the nucleotide sequence of SEQ ID NO: 422. The nucleotide sequences encoding the light chain and heavy chain may be separated by a Furin-2A linker (SEQ ID NOs: 231) to create a bicistronic vector. Alternatively, the nucleotide sequences of the light chain and heavy chain are separated by a Furin-T2A linker, such as SEQ ID NO: 429, and as encoded by SEQ ID NO: 424. Expression of the lanadelumab may be directed by a constitutive or a tissue specific promoter. In certain embodiments, the transgene contains a CAG promoter (SEQ ID NO: 411) or a TBG (SEQ ID NO; 423) promoter. Alternatively, the promoter may be a tissue specific promoter (or regulatory sequence including promoter and enhancer elements) such as the APOE.hAAT regulatory sequence (SEQ ID NO: 412), LSPX1 (SEQ ID NO: 315), LSPX3, LTP1 (SEQ ID NO; 317) or LMTP6 (SEQ ID NO: 320) promoter or CK8 (SEQ ID NO: 413) promoter. See FIG. 24A for a schematic showing the genomic configuration. The transgenes may contain elements provided in Table 1. Exemplary transgenes encoding full length lanadelumab are provided in Table 8 and include CAG.LAN.F2A (SEQ ID NO: 436); CAG.LAN.T2A (SEQ ID NO; 437); TBG.LAN.T2A (SEQ ID NO; 438); APOE.hAAT.LAN.T2A (SEQ ID NO: 439); LSPX1.LAN.T2A (SEQ ID NO; 440); LSPX2.LAN.T2A (SEQ ID NO: 441); LTP1.LAN.T2A (SEQ ID NO: 442); and LMTP6.LAN.T2A (SEQ ID NO: 443). ITR sequences are added to the 5′ and 3; ends of the constructs to generate the genomes. The transgenes may be packaged into AAV, particularly AAV8.

[1131] In certain embodiments, the anti-pKal antigen-binding fragment transgene encodes an pKal antigen-binding fragment comprising a light chain comprising an amino acid sequence that is at least 85%, 86%, 87%, 88%, 89%, 90%, 91%, 92%, 93%, 94%, 95%, 96%, 97%, 98% or 99% identical to the sequence set forth in SEQ ID NO: 70. In certain embodiments, the anti-pKal antigen-binding fragment transgene encodes an pKal antigen-binding fragment comprising a heavy chain comprising an amino acid sequence that is at least 85%, 86%, 87%, 88%, 89%, 90%, 91%, 92%, 93%, 94%, 95%, 96%, 97%, 98% or 99% identical to the sequence set forth in SEQ ID NO: 69. In certain embodiments, the anti-pKal antigen-binding fragment transgene encodes an antigen-binding fragment comprising a light chain comprising an amino acid sequence that is at least 85%, 86%, 87%, 88%, 89%, 90%, 91%, 92%, 93%, 94%, 95%, 96%, 97%, 98% or 99% identical to the sequence set forth in SEQ ID NO: 70 and a heavy chain comprising an amino acid sequence that is at least 85%, 86%, 87%, 88%, 89%, 90%, 91%, 92%, 93%, 94%, 95%, 96%, 97%, 98% or 99% identical to the sequence set forth in SEQ ID NO: 69. In specific embodiments, the pKal antigen binding fragment comprises a heavy chain comprising an amino acid sequence of SEQ ID NO: 69 with 1, 2, 3, 4, 5, 6, 7, 8, 9, 10, 11, 12, 13, 14, 15 or more amino acid substitutions, insertions or deletions, and the substitutions, insertions or deletions are made, e.g., in the framework regions (e.g., those regions outside of the CDRs, which CDRs are underlined in FIG. 19) or are substitutions with an amino acid present at that position in the heavy chain of one or more of the other therapeutic antibodies, for example, as identified by the alignment in FIG. 20A. In specific embodiments, the pKal antigen binding fragment comprises a light chain comprising an amino acid sequence of SEQ ID NO: 70 with 1, 2, 3, 4, 5, 6, 7, 8, 9, 10, 11, 12, 13, 14, 15 or more amino acid substitutions, insertions or deletions, and the substitutions, insertions or deletions are made, e.g., in the framework regions (e.g., those regions outside of the CDRs, which CDRs are underlined in FIG. 19) or are substitutions with an amino acid present at that position in the light chain of one or more of the other therapeutic antibodies, for example, as identified by the alignment in FIG. 20B.

[1132] In certain embodiments, the anti-pKal antigen-binding fragment transgene encodes a hyperglycosylated lanadelumab Fab, comprising a heavy chain and a light chain of SEQ ID NOs: 69 and 70, respectively, with one or more of the following mutations: M117N (heavy chain) and/or Q159N, Q159S, and/or E194N (light chain) (see FIGS. 20A (heavy chain) and 20B (light chain)).

[1133] In certain embodiments, the anti-pKal antigen-binding fragment transgene encodes an antigen-binding fragment and comprises the nucleotide sequences encoding the six lanadelumab CDRs which are underlined in the heavy and light chain variable domain sequences of FIG. 19 which are spaced between framework regions, generally human framework regions, and associated with constant domains depending upon the form of the antigen-binding molecule, as is known in the art to form the heavy and/or light chain variable domain of an anti-pKal antibody or antigen-binding fragment thereof.

[1134] Gene Therapy Methods

[1135] Provided are methods of treating human subjects for angioedema by administration of a viral vector containing a transgene encoding an anti-pKal antibody, or antigen binding fragment thereof. The antibody may be lanadelumab and is, e.g., a full length or substantially full length antibody or Fab fragment thereof, or other antigen-binding fragment thereof. In embodiments, the patient has been diagnosed with and/or has symptoms associated with angioedema. Recombinant vectors used for delivering the transgene are described in Section 5.4.2 and exemplary transgenes are provided above. Such vectors should have a tropism for human liver or muscle cells and can include non-replicating rAAV, particularly those bearing an AAV8 or AAV9 capsid, preferably AAV8. The recombinant vectors, such as shown in FIG. 19, can be administered in any manner such that the recombinant vector enters the liver or muscle tissue, e.g., by introducing the recombinant vector into the bloodstream, for example by intravenous or intramuscular administration. See Section 5.5.2 for details regarding the methods of treatment.

[1136] Provided are methods of treating human subjects for diabetic retinopathy or diabetic macular edema by administration of a viral vector containing a transgene encoding an anti-pKal antibody, or antigen binding fragment thereof. See also, Section 5.3.8 above, also. The antibody may be lanadelumab and is, e.g., a full length or substantially full length antibody or Fab fragment thereof, or other antigen-binding fragment thereof. In embodiments, the patient has been diagnosed with and/or has symptoms associated with diabetic retinopathy or diabetic macular edema. Recombinant vectors used for delivering the transgene are described in Section 5.4.3 and exemplary transgenes are provided above. Such vectors should have a tropism for human retinal cells and can include non-replicating rAAV, particularly those bearing an AAV8 or AAV9 capsid. The recombinant vectors, such as shown in FIG. 19, can be administered in any manner such that the recombinant vector enters the retinal tissue, for example as disclosed in Section 5.5.3. In particular embodiments, the transgene is CAG.LAN.F2A (SEQ ID NO: 436); CAG.LAN.T2A (SEQ ID NO; 437); TBG.LAN.T2A (SEQ ID NO; 438); APOE.hAAT.LAN.T2A (SEQ ID NO: 439); LSPX1.LAN.T2A (SEQ ID NO; 440); LSPX2.LAN.T2A (SEQ ID NO: 441); LTP1.LAN.T2A (SEQ ID NO: 442); or LMTP6.LAN.T2A (SEQ ID NO: 443) in an AAV8 vector.

[1137] See Section 5.5.2 and 5.5.4 for details regarding the methods of treatment.

[1138] Examples 51, 53, 54 and 56 herein provide results of serum levels of lanadelumab in mice and rats administered AAV vectors encoding full length lanadelumab to assess different promoters and other regulatory elements, linkers, AAV types, modes of administration, etc. Such results inform dosage of a recombinant AAV vector encoding lanadelumab to achieve serum levels, particularly, steady state serum levels, sufficient for therapeutic efficacy. Steady state serum levels of sufficient therapeutic efficacy may be determined through clinical studies, for example, as provided in the prescribing information for lanadelumab (see TAKHZYRO® Prescribing Information). In particular embodiments, the AAV8 lanadelumab vector is administered to a patient in need thereof, for example, a patient diagnosed with or suffering from HAE, at a dosage (vector genomes) sufficient for to expression of therapeutically effective levels of lanadelumab in the patient serum. In specific embodiments, the administration results in Cₘₐₓ of 9 μg/ml to 35 μg/ml, including between 12 μg/ml to 25 μg/ml, or between 20 μg/ml and 35 μg/ml; and a Cₘᵢₙ of 4 μg/ml to 25 μg/ml or a Cₘᵢₙ greater than 20 μg/ml, but in certain embodiments less than 200 μg/ml or 500 μg/ml. The serum or plasma concentration is preferably achieved as a steady state concentration, for example, maintaining serum or plasma levels within the Cₘₐₓ and Cₘᵢₙ for at least 1 month, 2 months, 3 months, or greater than 3 months, or 1 year. In specific embodiments, administration of the AAV vector results in steady state lanadelumab plasma concentration of 5 μg/ml to 30 μg/ml or 10 μg/ml to 20 μg/ml; or 15 μg/ml to 30 μg/ml or greater than 20 μg/ml, but in certain embodiments less than 200 μg/ml or 500 mg/ml. In particular embodiments, the the lanadelumab antibody secreted into the plasma exhibits greater a greater than at least 40%, 45%, 50%, 55%, 60%, 65% or 70 reduction in pKal activity as measured by a kinetic enzymatic functional assay, for example, the assay described in Example 57. In certain embodiments, the activity of the lanadelumab antibody is measured at 2 weeks, 3 weeks, 4 weeks, 5 weeks, 6 weeks, 7 weeks, 8 weeks, 9 weeks, 10 weeks, 11 weeks or 12 weeks after administration of the AAV vector. The methods of treatment provided herein reduce the incidence or severity of angioedema occurrences or attacks. In particular embodiments, the angioedema occurs in the skin, the gastrointestinal tract or the upper airway.

[1139] Subjects to whom such gene therapy is administered can be those responsive to anti-pKal therapy. In certain embodiments, the methods encompass treating patients who have been diagnosed with angioedema or diabetic retinopathy, or have one or more symptoms associated therewith, and identified as responsive to treatment with an anti-pKal antibody or considered a good candidate for therapy with an anti-pKal antibody. In specific embodiments, the patients have previously been treated with lanadelumab, and have been found to be responsive to lanadelumab. To determine responsiveness, the anti-pKal antibody or antigen-binding fragment transgene product (e.g., produced in cell culture, bioreactors, etc.) may be administered directly to the subject.

[1140] Human Post Translationally Modified Antibodies

[1141] The production of the anti-pKal HuPTM mAb or HuPTM Fab, should result in a “biobetter” molecule for the treatment of angioedema accomplished via gene therapy—e.g., by administering a viral vector or other DNA expression construct encoding the anti-pKal HuPTM Fab, intravenously to human subjects (patients) diagnosed with or having one or more symptoms of angioedema, to create a permanent depot in the liver or muscle tissue that continuously supplies the fully-human post-translationally modified, e.g., human-glycosylated, sulfated transgene product produced by transduced liver or muscle cells.

[1142] In specific embodiments, the anti-pKal HuPTM mAb or antigen-binding fragment thereof has heavy and light chains with the amino acid sequences of the heavy and light chain Fab portions of lanadelumab as set forth in FIG. 19 (with glutamine (Q) glycosylation sites; asparaginal (N) glycosylation sites, non-consensus asparaginal (N) glycosylation sites; and tyrosine-O-sulfation sites (Y) are as indicated in the legend) has a glycosylation, particularly a 2,6-sialylation, at one or more of the amino acid positions N77, Q114 and/or N164 of the heavy chain (SEQ ID NO: 69) or Q99, N157, and/or N209 of the light chain (SEQ ID NO: 70). Alternatively or in addition to, the HuPTM mAb or antigen binding-fragment thereof with the heavy and light chain variable domain sequences of lanadelumab has a sulfation group at Y94 and/or Y95 of the heavy chain (SEQ ID NO: 69) and/or Y86 and/or Y87 of the light chain (SEQ ID NO: 70). In other embodiments, the anti-pKal HuPTM mAb or antigen-binding fragment thereof does not contain detectable NeuGc moieties and/or does not contain detectable alpha-Gal moieties. In certain embodiments, the HuPTM mAb is a full length or substantially full length mAb with an Fc region.

[1143] In certain embodiments, the HuPTM mAb or Fab (or a hyperglycosylated derivative of either) is therapeutically effective and is at least 0.5%, 1% or 2% glycosylated and/or sulfated and may be at least 5%, 10% or even 50% or 100% glycosylated and/or sulfated. The goal of gene therapy treatment provided herein is to slow or arrest the progression of angioedema, reduce the levels of pain or discomfort for the patient, or reduce levels of autoreactive B cells and immunoglobulin producing plasma cells. Efficacy may be monitored by scoring the function, symptoms, or degree of inflammation in the affected tissue or area of the body, e.g., such as the skin, joints, kidneys, lungs, blood cells, heart, and brain. For example, efficacy can be monitored by assessing changes in attack severity or frequency.

[1144] Combinations of delivery of the anti-pKal HuPTM mAb or antigen-binding fragment thereof, to the liver or muscle accompanied by delivery of other available treatments are encompassed by the methods provided herein. The additional treatments may be administered before, concurrently, or subsequent to the gene therapy treatment. Available treatments for angioedema that could be combined with the gene therapy provided herein include but are not limited to danazol, bradykinin receptor antagonist (e.g., icatibant), plasma kallikrein inhibitor (e.g., ecallantide), C1 esterase inhibitor, conestat alfa, anti-fibrinolytic agents (e.g., tranexamic acid), omalizumab, and fresh frozen plasma transfusions, antihistamines, and corticosteroids and administration with anti-pKal agents, including but not limited to lanadelumab.

### 5.3.19. Anti-IL and IL-Receptor and Other Targets HuPTM Constructs and Formulations for Autoimmune, Respiratory, and Allergic Diseases

[1145] Compositions and methods are described for the delivery of HuPTM mAbs and antigen-binding fragments thereof, such as HuPTM Fabs, that bind to interleukins (IL), interleukin receptors (ILR) (e.g., IL31RA, IL13, IL5, or IL-5), immunoglobin E (IgE), or thymic stromal lymphopoietin (TSLP), derived from anti-ILs, anti-ILRs, anti-IgE, or anti-TSLP indicated for treating one or more autoimmune-related disorders, respiratory diseases, and allergic diseases, such as atopic dermatitis, chronic idiopathic urticaria, asthma, eosinophilic asthma, or chronic obstructive pulmonary disease (COPD) (collectively referred to hereinafter as “subject AI-Ds”). In particular embodiments, the HuPTM mAb has the amino acid sequence of benralizumab, reslizumab, tralokinumab, nemolizumab, omalizumab, or tezepelumab or an antigen binding fragment of one of the foregoing. The amino acid sequences of Fab fragments of these antibodies are provided in FIGS. 29A to 29F, respectively. Delivery may be accomplished via gene therapy—e.g., by administering a viral vector or other DNA expression construct encoding an IL/ILR-binding, IgE-binding, or TSLP-binding HuPTM mAb (or an antigen binding fragment and/or a hyperglycosylated derivative or other derivative, thereof) to patients (human subjects) diagnosed with, or having one or more symptoms of atopic dermatitis, chronic idiopathic urticaria, asthma, eosphinophilic asthma, or COPD to create a permanent depot that continuously supplies the human PTM, e.g., human-glycosylated, transgene product.

[1146] Transgenes

[1147] Provided are recombinant vectors containing a transgene encoding a HuPTM mAb or HuPTM Fab (or other antigen binding fragment of the HuPTM mAb) that binds to IL/ILR, IgE, or TSLP that can be administered to deliver the HuPTM mAb or antigen binding fragment in a patient. The transgene is a nucleic acid comprising the nucleotide sequences encoding an antigen binding fragment of an antibody that binds to IL/ILR, such as benralizumab, reslizumab, tralokinumab, nemolizumab; IgE, such as omalizumab; or TSLP, such as tezepelumab, or variants thereof as detailed herein. The transgene may also encode an anti-IL/ILR, anti-IgE, or anti-TSLP antigen binding fragment that contains additional glycosylation sites (e.g., see Courtois et al.).

[1148] In certain embodiments, the anti-IL5 antigen-binding fragment transgene comprises the nucleotide sequences encoding the heavy and light chains of the Fab portion of benralizumab (having amino acid sequences of SEQ ID NOs. 364 and 365, respectively, see Table 5 and FIG. 29A). The nucleotide sequences may be codon optimized for expression in human cells. Nucleotide sequences may, for example, comprise the nucleotide sequences of SEQ ID NO: 380 (encoding the benralizumab heavy chain Fab portion) and SEQ ID NO: 381 (encoding the benralizumab light chain Fab portion) as set forth in Table 6. The heavy and light chain sequences both have a signal or leader sequence at the N-terminus appropriate for expression and secretion in human cells, in particular, human liver cells (e.g., hepatocytes) or muscle cells. The signal sequence may have the amino acid sequence of MYRMQLLLLIALSLALVTNS (SEQ ID NO: 146). Alternatively, the signal sequence may have an amino acid sequence selected from any one of the signal sequences set forth in Table 3 or 4 that correspond to the proteins secreted by myocytes or hepatocytes, respectively.

[1149] In addition to the heavy and light chain variable domain and C_{H}1 and C_{L} domain sequences, the transgenes may comprise, at the C-terminus of the heavy chain C_{H}1 domain sequence, all or a portion of the hinge region. In specific embodiments, the anti-IL5-antigen binding domain has a heavy chain Fab domain of SEQ ID NO: 364 with additional hinge region sequence starting after the C-terminal valine (V), contains all or a portion of the amino acid sequence EPKSCDKTHTCPPCPAPELLGG (SEQ ID NO: 194), and specifically, EPKSCDKTHL (SEQ ID NO: 196), EPKSCDKTHT (SEQ ID NO: 197), EPKSCDKTHTCPPCPA (SEQ ID NO: 198), EPKSCDKTHLCPPCPA (SEQ ID NO: 199), EPKSCDKTHTCPPCPAPELLGGPSVFL (SEQ ID NO: 200) or EPKSCDKTHLCPPCPAPELLGGPSVFL (SEQ ID NO: 201) as set forth in FIG. 29A. These hinge regions may be encoded by nucleotide sequences at the 3′ end of SEQ ID NO: 380 by the hinge region encoding sequences set forth in Table 6 (SEQ ID NO: 380). In another embodiment, the transgenes comprise the amino acid sequences encoding the full length (or substantially full length) heavy and light chains of the antibody, comprising the Fc domain at the C terminus of the heavy chain, e.g. having an amino acid sequence of SEQ ID NO: 394 (Table 7) or an IgG1 Fc domain, such as SEQ ID NO: 283 or as depicted in FIG. 23, or a mutant or variant thereof. The Fc domain may be engineered for altered binding to one or more Fc receptors and/or effector function as disclosed in Section 5.1.9, infra.

[1150] In certain embodiments, the anti-IL5 antigen-binding fragment transgene encodes an IL5 antigen-binding fragment comprising a light chain comprising an amino acid sequence that is at least 85%, 86%, 87%, 88%, 89%, 90%, 91%, 92%, 93%, 94%, 95%, 96%, 97%, 98% or 99% identical to the sequence set forth in SEQ ID NO: 365. In certain embodiments, the anti-IL5 antigen-binding fragment transgene encodes an IL5 antigen-binding fragment comprising a heavy chain comprising an amino acid sequence that is at least 85%, 86%, 87%, 88%, 89%, 90%, 91%, 92%, 93%, 94%, 95%, 96%, 97%, 98% or 99% identical to the sequence set forth in SEQ ID NO: 364. In certain embodiments, the anti-IL5 antigen-binding fragment transgene encodes an antigen-binding fragment comprising a light chain comprising an amino acid sequence that is at least 85%, 86%, 87%, 88%, 89%, 90%, 91%, 92%, 93%, 94%, 95%, 96%, 97%, 98% or 99% identical to the sequence set forth in SEQ ID NO: 365 and a heavy chain comprising an amino acid sequence that is at least 85%, 86%, 87%, 88%, 89%, 90%, 91%, 92%, 93%, 94%, 95%, 96%, 97%, 98% or 99% identical to the sequence set forth in SEQ ID NO: 364. In specific embodiments, the IL5 antigen binding fragment comprises a heavy chain comprising an amino acid sequence of SEQ ID NO: 364 with 1, 2, 3, 4, 5, 6, 7, 8, 9, 10, 11, 12, 13, 14, 15 or more amino acid substitutions, insertions or deletions, and the substitutions, insertions or deletions are made, e.g., in the framework regions (e.g., those regions outside of the CDRs, which CDRs are underlined in FIG. 29A) or are substitutions with an amino acid present at that position in the heavy chain of one or more of the other therapeutic antibodies, for example, as identified by the alignment in FIG. 20A. In specific embodiments, the IL5 antigen binding fragment comprises a light chain comprising an amino acid sequence of SEQ ID NO: 365 with 1, 2, 3, 4, 5, 6, 7, 8, 9, 10, 11, 12, 13, 14, 15 or more amino acid substitutions, insertions or deletions, and the substitutions, insertions or deletions are made, e.g., in the framework regions (e.g., those regions outside of the CDRs, which CDRs are underlined in FIG. 29A) or are substitutions with an amino acid present at that position in the light chain of one or more of the other therapeutic antibodies, for example, as identified by the alignment in FIG. 20B.

[1151] In certain embodiments, the anti-IL5 antigen-binding fragment transgene encodes a hyperglycosylated benralizumab Fab, comprising a heavy chain and a light chain of SEQ ID NOs: 364 and 365, respectively, with one or more of the following mutations: L116N (heavy chain) and/or Q160N, Q160S , and/or E195N (light chain) (see FIGS. 20A (heavy chain) and 20B (light chain)).

[1152] In certain embodiments, the anti-IL5 antigen-binding fragment transgene encodes an antigen-binding fragment and comprises the nucleotide sequences encoding the six benralizumab CDRs which are underlined in the heavy and light chain variable domain sequences of FIG. 29A which are spaced between framework regions, generally human framework regions, and associated with constant domains depending upon the form of the antigen-binding molecule, as is known in the art to form the heavy and/or light chain variable domain of an anti-IL5 antibody or antigen-binding fragment thereof.

[1153] In certain embodiments, the anti-IL5R antigen-binding fragment transgene comprises the nucleotide sequences encoding the heavy and light chains of the Fab portion of reslizumab (having amino acid sequences of SEQ ID NOs. 366 and 367, respectively, see Table 4 and FIG. 29B). The nucleotide sequences may be codon optimized for expression in human cells. Nucleotide sequences may, for example, comprise the nucleotide sequences of SEQ ID NO: 382 (encoding the reslizumab heavy chain Fab portion) and SEQ ID NO: 383 (encoding the reslizumab light chain Fab portion) as set forth in Table 6. The heavy and light chain sequences both have a signal or leader sequence at the N-terminus appropriate for expression and secretion in human cells, in particular, human liver cells (e.g., hepatocytes) or muscle cells. The signal sequence may have the amino acid sequence of MYRMQLLLLIALSLALVTNS (SEQ ID NO: 146). Alternatively, the signal sequence may have an amino acid sequence selected from any one of the signal sequences set forth in Table 3 or 4 that correspond to the proteins secreted by myocytes or hepatocytes, respectively.

[1154] In addition to the heavy and light chain variable domain and C_{H}1 and C_{L} domain sequences, the transgenes may comprise, at the C-terminus of the heavy chain C_{H}1 domain sequence, all or a portion of the hinge region. In specific embodiments, the anti-IL5R-antigen binding domain has a heavy chain Fab domain of SEQ ID NO: 366 with additional hinge region sequence starting after the C-terminal valine (V), contains all or a portion of the amino acid sequence ESKYGPPCPPCPAPEFLGG (SEQ ID NO: 214), and specifically, ESKYGPPCPPCPA (SEQ ID NO: 216), ESKYGPPCPSCPA (SEQ ID NO: 217), ESKYGPPCPSCPAPEFLGGPSVFL (SEQ ID NO: 218), or ESKYGPPCPPCPAPEFLGGPSVFL (SEQ ID NO: 219) as set forth in FIG. 29B. These hinge regions may be encoded by nucleotide sequences at the 3′ end of SEQ ID NO: 382 by the hinge region encoding sequences set forth in Table 6 (SEQ ID NO: 382). In another embodiment, the transgenes comprise the amino acid sequences encoding the full length (or substantially full length) heavy and light chains of the antibody, comprising the Fc domain at the C terminus of the heavy chain, e.g. having an amino acid sequence of SEQ ID NO: 395 (Table 7) or an IgG4 Fc domain, such as SEQ ID NO: 285 or as depicted in FIG. 23, or a mutant or variant thereof. The Fc domain may be engineered for altered binding to one or more Fc receptors and/or effector function as disclosed in Section 5.1.9, infra.

[1155] In certain embodiments, the anti-IL5R antigen-binding fragment transgene encodes an IL5R antigen-binding fragment comprising a light chain comprising an amino acid sequence that is at least 85%, 86%, 87%, 88%, 89%, 90%, 91%, 92%, 93%, 94%, 95%, 96%, 97%, 98% or 99% identical to the sequence set forth in SEQ ID NO: 367. In certain embodiments, the anti-IL5R antigen-binding fragment transgene encodes an IL5R antigen-binding fragment comprising a heavy chain comprising an amino acid sequence that is at least 85%, 86%, 87%, 88%, 89%, 90%, 91%, 92%, 93%, 94%, 95%, 96%, 97%, 98% or 99% identical to the sequence set forth in SEQ ID NO: 366. In certain embodiments, the anti-IL5R antigen-binding fragment transgene encodes an antigen-binding fragment comprising a light chain comprising an amino acid sequence that is at least 85%, 86%, 87%, 88%, 89%, 90%, 91%, 92%, 93%, 94%, 95%, 96%, 97%, 98% or 99% identical to the sequence set forth in SEQ ID NO: 367 and a heavy chain comprising an amino acid sequence that is at least 85%, 86%, 87%, 88%, 89%, 90%, 91%, 92%, 93%, 94%, 95%, 96%, 97%, 98% or 99% identical to the sequence set forth in SEQ ID NO: 366. In specific embodiments, the IL5R antigen binding fragment comprises a heavy chain comprising an amino acid sequence of SEQ ID NO: 366 with 1, 2, 3, 4, 5, 6, 7, 8, 9, 10, 11, 12, 13, 14, 15 or more amino acid substitutions, insertions or deletions, and the substitutions, insertions or deletions are made, e.g., in the framework regions (e.g., those regions outside of the CDRs, which CDRs are underlined in FIG. 29B) or are substitutions with an amino acid present at that position in the heavy chain of one or more of the other therapeutic antibodies, for example, as identified by the alignment in FIG. 20A. In specific embodiments, the IL5R antigen binding fragment comprises a light chain comprising an amino acid sequence of SEQ ID NO: 367 with 1, 2, 3, 4, 5, 6, 7, 8, 9, 10, 11, 12, 13, 14, 15 or more amino acid substitutions, insertions or deletions, and the substitutions, insertions or deletions are made, e.g., in the framework regions (e.g., those regions outside of the CDRs, which CDRs are underlined in FIG. 29B) or are substitutions with an amino acid present at that position in the light chain of one or more of the other therapeutic antibodies, for example, as identified by the alignment in FIG. 20B.

[1156] In certain embodiments, the anti-IL5R antigen-binding fragment transgene encodes a hyperglycosylated reslizumab Fab, comprising a heavy chain and a light chain of SEQ ID NOs: 366 and 367, respectively, with one or more of the following mutations: L111N (heavy chain) and/or Q160N, Q160S, and/or E195N (light chain) (see FIGS. 20A (heavy chain) and 20B (light chain)).

[1157] In certain embodiments, the anti-IL5R antigen-binding fragment transgene encodes an antigen-binding fragment and comprises the nucleotide sequences encoding the six reslizumab CDRs which are underlined in the heavy and light chain variable domain sequences of FIG. 29B which are spaced between framework regions, generally human framework regions, and associated with constant domains depending upon the form of the antigen-binding molecule, as is known in the art to form the heavy and/or light chain variable domain of an anti-IL5R antibody or antigen-binding fragment thereof.

[1158] In certain embodiments, the anti-IL13 antigen-binding fragment transgene comprises the nucleotide sequences encoding the heavy and light chains of the Fab portion of tralokinumab (having amino acid sequences of SEQ ID NOs. 368 and 369, respectively, see Table 5 and FIG. 29C). The nucleotide sequences may be codon optimized for expression in human cells. Nucleotide sequences may, for example, comprise the nucleotide sequences of SEQ ID NO: 384 (encoding the tralokinumab heavy chain Fab portion) and SEQ ID NO: 385 (encoding the tralokinumab light chain Fab portion) as set forth in Table 6. The heavy and light chain sequences both have a signal or leader sequence at the N-terminus appropriate for expression and secretion in human cells, in particular, human liver cells (e.g., hepatocytes) or muscle cells. The signal sequence may have the amino acid sequence of MYRMQLLLLIALSLALVTNS (SEQ ID NO: 146). Alternatively, the signal sequence may have an amino acid sequence selected from any one of the signal sequences set forth in Table 3 or 4 that correspond to the proteins secreted by myocytes or hepatocytes, respectively.

[1159] In addition to the heavy and light chain variable domain and C_{H}1 and C_{L} domain sequences, the transgenes may comprise, at the C-terminus of the heavy chain C_{H}1 domain sequence, all or a portion of the hinge region. In specific embodiments, the anti-IL13-antigen binding domain has a heavy chain Fab domain of SEQ ID NO: 368 with additional hinge region sequence starting after the C-terminal valine (V), contains all or a portion of the amino acid sequence ESKYGPPCPPCPAPEFLGG (SEQ ID NO: 214), and specifically, ESKYGPPCPPCPA (SEQ ID NO: 216), ESKYGPPCPSCPA (SEQ ID NO: 217), ESKYGPPCPSCPAPEFLGGPSVFL (SEQ ID NO: 218), or ESKYGPPCPPCPAPEFLGGPSVFL (SEQ ID NO: 219) as set forth in FIG. 29C. These hinge regions may be encoded by nucleotide sequences at the 3′ end of SEQ ID NO: 384 by the hinge region encoding sequences set forth in Table 6 (SEQ ID NO: 384). In another embodiment, the transgenes comprise the amino acid sequences encoding the full length (or substantially full length) heavy and light chains of the antibody, comprising the Fc domain at the C terminus of the heavy chain, e.g. having an amino acid sequence of SEQ ID NO: 396 (Table 7) or an IgG4 Fc domain, such as SEQ ID NO: 285 or as depicted in FIG. 23, or a mutant or variant thereof. The Fc domain may be engineered for altered binding to one or more Fc receptors and/or effector function as disclosed in Section 5.1.9, infra.

[1160] In certain embodiments, the anti-IL13 antigen-binding fragment transgene encodes an IL13 antigen-binding fragment comprising a light chain comprising an amino acid sequence that is at least 85%, 86%, 87%, 88%, 89%, 90%, 91%, 92%, 93%, 94%, 95%, 96%, 97%, 98% or 99% identical to the sequence set forth in SEQ ID NO: 369. In certain embodiments, the anti-IL13 antigen-binding fragment transgene encodes an IL13 antigen-binding fragment comprising a heavy chain comprising an amino acid sequence that is at least 85%, 86%, 87%, 88%, 89%, 90%, 91%, 92%, 93%, 94%, 95%, 96%, 97%, 98% or 99% identical to the sequence set forth in SEQ ID NO: 368. In certain embodiments, the anti-IL13 antigen-binding fragment transgene encodes an antigen-binding fragment comprising a light chain comprising an amino acid sequence that is at least 85%, 86%, 87%, 88%, 89%, 90%, 91%, 92%, 93%, 94%, 95%, 96%, 97%, 98% or 99% identical to the sequence set forth in SEQ ID NO: 369 and a heavy chain comprising an amino acid sequence that is at least 85%, 86%, 87%, 88%, 89%, 90%, 91%, 92%, 93%, 94%, 95%, 96%, 97%, 98% or 99% identical to the sequence set forth in SEQ ID NO: 368. In specific embodiments, the IL13 antigen binding fragment comprises a heavy chain comprising an amino acid sequence of SEQ ID NO: 368 with 1, 2, 3, 4, 5, 6, 7, 8, 9, 10, 11, 12, 13, 14, 15 or more amino acid substitutions, insertions or deletions, and the substitutions, insertions or deletions are made, e.g., in the framework regions (e.g., those regions outside of the CDRs, which CDRs are underlined in FIG. 29C) or are substitutions with an amino acid present at that position in the heavy chain of one or more of the other therapeutic antibodies, for example, as identified by the alignment in FIG. 20A. In specific embodiments, the IL13 antigen binding fragment comprises a light chain comprising an amino acid sequence of SEQ ID NO: 369 with 1, 2, 3, 4, 5, 6, 7, 8, 9, 10, 11, 12, 13, 14, 15 or more amino acid substitutions, insertions or deletions, and the substitutions, insertions or deletions are made, e.g., in the framework regions (e.g., those regions outside of the CDRs, which CDRs are underlined in FIG. 29C) or are substitutions with an amino acid present at that position in the light chain of one or more of the other therapeutic antibodies, for example, as identified by the alignment in FIG. 20B.

[1161] In certain embodiments, the anti-IL13 antigen-binding fragment transgene encodes a hyperglycosylated tralokinumab Fab, comprising a heavy chain and a light chain of SEQ ID NOs: 368 and 369, respectively, with one or more of the following mutations: L117N (heavy chain) and/or Q196N (light chain) (see FIGS. 20A (heavy chain) and 20B (light chain)).

[1162] In certain embodiments, the anti-IL13 antigen-binding fragment transgene encodes an antigen-binding fragment and comprises the nucleotide sequences encoding the six tralokinumab CDRs which are underlined in the heavy and light chain variable domain sequences of FIG. 29C which are spaced between framework regions, generally human framework regions, and associated with constant domains depending upon the form of the antigen-binding molecule, as is known in the art to form the heavy and/or light chain variable domain of an anti-IL13 antibody or antigen-binding fragment thereof.

[1163] In certain embodiments, the anti-IL31RA antigen-binding fragment transgene comprises the nucleotide sequences encoding the heavy and light chains of the Fab portion of nemolizumab (having amino acid sequences of SEQ ID NOs. 370 and 371, respectively, see Table 5 and FIG. 29D). The nucleotide sequences may be codon optimized for expression in human cells. Nucleotide sequences may, for example, comprise the nucleotide sequences of SEQ ID NO: 386 (encoding the nemolizumab heavy chain Fab portion) and SEQ ID NO: 387 (encoding the nemolizumab light chain Fab portion) as set forth in Table 6. The heavy and light chain sequences both have a signal or leader sequence at the N-terminus appropriate for expression and secretion in human cells, in particular, human liver cells (e.g., hepatocytes) or muscle cells. The signal sequence may have the amino acid sequence of MYRMQLLLLIALSLALVTNS (SEQ ID NO: 146). Alternatively, the signal sequence may have an amino acid sequence selected from any one of the signal sequences set forth in Table 3 or 4 that correspond to the proteins secreted by myocytes or hepatocytes, respectively.

[1164] In addition to the heavy and light chain variable domain and C_{H}1 and C_{L} domain sequences, the transgenes may comprise, at the C-terminus of the heavy chain C_{H}1 domain sequence, all or a portion of the hinge region. In specific embodiments, the anti-IL31RA-antigen binding domain has a heavy chain Fab domain of SEQ ID NO: 370 with additional hinge region sequence starting after the C-terminal valine (V), contains all or a portion of the amino acid sequence ERKSCVECPPCPAPPVAG (SEQ ID NO: 433) or ERKSCVECPPCPA (SEQ ID NO: 434) as set forth in FIG. 29D. These hinge regions may be encoded by nucleotide sequences at the 3′ end of SEQ ID NO: 386 by the hinge region encoding sequences set forth in Table 6 (SEQ ID NO: 386). In another embodiment, the transgenes comprise the amino acid sequences encoding the full length (or substantially full length) heavy and light chains of the antibody, comprising the Fc domain at the C terminus of the heavy chain, e.g. having an amino acid sequence of SEQ ID NO: 397 (Table 7) or an IgG2 Fc domain, such as SEQ ID NO: 284 or as depicted in FIG. 23, or a mutant or variant thereof. The Fc domain may be engineered for altered binding to one or more Fc receptors and/or effector function as disclosed in Section 5.1.9, infra.

[1165] In certain embodiments, the anti-IL31RA antigen-binding fragment transgene encodes an IL31RA antigen-binding fragment comprising a light chain comprising an amino acid sequence that is at least 85%, 86%, 87%, 88%, 89%, 90%, 91%, 92%, 93%, 94%, 95%, 96%, 97%, 98% or 99% identical to the sequence set forth in SEQ ID NO: 371. In certain embodiments, the anti-IL31RA antigen-binding fragment transgene encodes an IL31RA antigen-binding fragment comprising a heavy chain comprising an amino acid sequence that is at least 85%, 86%, 87%, 88%, 89%, 90%, 91%, 92%, 93%, 94%, 95%, 96%, 97%, 98% or 99% identical to the sequence set forth in SEQ ID NO: 370. In certain embodiments, the anti-IL31RA antigen-binding fragment transgene encodes an antigen-binding fragment comprising a light chain comprising an amino acid sequence that is at least 85%, 86%, 87%, 88%, 89%, 90%, 91%, 92%, 93%, 94%, 95%, 96%, 97%, 98% or 99% identical to the sequence set forth in SEQ ID NO: 371 and a heavy chain comprising an amino acid sequence that is at least 85%, 86%, 87%, 88%, 89%, 90%, 91%, 92%, 93%, 94%, 95%, 96%, 97%, 98% or 99% identical to the sequence set forth in SEQ ID NO: 370. In specific embodiments, the IL31RA antigen binding fragment comprises a heavy chain comprising an amino acid sequence of SEQ ID NO: 370 with 1, 2, 3, 4, 5, 6, 7, 8, 9, 10, 11, 12, 13, 14, 15 or more amino acid substitutions, insertions or deletions, and the substitutions, insertions or deletions are made, e.g., in the framework regions (e.g., those regions outside of the CDRs, which CDRs are underlined in FIG. 29D) or are substitutions with an amino acid present at that position in the heavy chain of one or more of the other therapeutic antibodies, for example, as identified by the alignment in FIG. 20A. In specific embodiments, the IL31RA antigen binding fragment comprises a light chain comprising an amino acid sequence of SEQ ID NO: 371 with 1, 2, 3, 4, 5, 6, 7, 8, 9, 10, 11, 12, 13, 14, 15 or more amino acid substitutions, insertions or deletions, and the substitutions, insertions or deletions are made, e.g., in the framework regions (e.g., those regions outside of the CDRs, which CDRs are underlined in FIG. 29D) or are substitutions with an amino acid present at that position in the light chain of one or more of the other therapeutic antibodies, for example, as identified by the alignment in FIG. 20B.

[1166] In certain embodiments, the anti-IL31RA antigen-binding fragment transgene encodes a hyperglycosylated nemolizumab Fab, comprising a heavy chain and a light chain of SEQ ID NOs: 370 and 371, respectively, with one or more of the following mutations: L116N (heavy chain) and/or Q160N and/or Q160S and/or E195N (light chain) (see FIGS. 20A (heavy chain) and 20B (light chain)).

[1167] In certain embodiments, the anti-IL31RA antigen-binding fragment transgene encodes an antigen-binding fragment and comprises the nucleotide sequences encoding the six nemolizumab CDRs which are underlined in the heavy and light chain variable domain sequences of FIG. 29D which are spaced between framework regions, generally human framework regions, and associated with constant domains depending upon the form of the antigen-binding molecule, as is known in the art to form the heavy and/or light chain variable domain of an anti-IL31RA antibody or antigen-binding fragment thereof.

[1168] In certain embodiments, the anti-IgE antigen-binding fragment transgene comprises the nucleotide sequences encoding the heavy and light chains of the Fab portion of omalizumab (having amino acid sequences of SEQ ID NOs. 372 and 33, respectively, see Table 5 and FIG. 29E). The nucleotide sequences may be codon optimized for expression in human cells. Nucleotide sequences may, for example, comprise the nucleotide sequences of SEQ ID NO: 388 (encoding the omalizumab heavy chain Fab portion) and SEQ ID NO: 389 (encoding the omalizumab light chain Fab portion) as set forth in Table 6. The heavy and light chain sequences both have a signal or leader sequence at the N-terminus appropriate for expression and secretion in human cells, in particular, human liver cells (e.g., hepatocytes) or muscle cells. The signal sequence may have the amino acid sequence of MYRMQLLLLIALSLALVTNS (SEQ ID NO: 146). Alternatively, the signal sequence may have an amino acid sequence selected from any one of the signal sequences set forth in Table 3 or 4 that correspond to the proteins secreted by myocytes or hepatocytes, respectively.

[1169] In addition to the heavy and light chain variable domain and C_{H}1 and C_{L} domain sequences, the transgenes may comprise, at the C-terminus of the heavy chain C_{H}1 domain sequence, all or a portion of the hinge region. In specific embodiments, the anti-IgE-antigen binding domain has a heavy chain Fab domain of SEQ ID NO: 372 with additional hinge region sequence starting after the C-terminal valine (V), contains all or a portion of the amino acid sequence EPKSCDKTHTCPPCPAPELLGG (SEQ ID NO: 194), and specifically, EPKSCDKTHL (SEQ ID NO: 196), EPKSCDKTHT (SEQ ID NO: 197), EPKSCDKTHTCPPCPA (SEQ ID NO: 198), EPKSCDKTHLCPPCPA (SEQ ID NO: 199), EPKSCDKTHTCPPCPAPELLGGPSVFL (SEQ ID NO: 200) or EPKSCDKTHLCPPCPAPELLGGPSVFL (SEQ ID NO: 201) as set forth in FIG. 29E. These hinge regions may be encoded by nucleotide sequences at the 3′ end of SEQ ID NO: 388 by the hinge region encoding sequences set forth in Table 6 (SEQ ID NO: 388). In another embodiment, the transgenes comprise the amino acid sequences encoding the full length (or substantially full length) heavy and light chains of the antibody, comprising the Fc domain at the C terminus of the heavy chain, e.g. having an amino acid sequence of SEQ ID NO: 398 (Table 7) or an IgG1 Fc domain, such as SEQ ID NO: 283 or as depicted in FIG. 23, or a mutant or variant thereof. The Fc domain may be engineered for altered binding to one or more Fc receptors and/or effector function as disclosed in Section 5.1.9, infra.

[1170] In certain embodiments, the anti-IgE antigen-binding fragment transgene encodes an IgE antigen-binding fragment comprising a light chain comprising an amino acid sequence that is at least 85%, 86%, 87%, 88%, 89%, 90%, 91%, 92%, 93%, 94%, 95%, 96%, 97%, 98% or 99% identical to the sequence set forth in SEQ ID NO: 373. In certain embodiments, the anti-IgE antigen-binding fragment transgene encodes an IgE antigen-binding fragment comprising a heavy chain comprising an amino acid sequence that is at least 85%, 86%, 87%, 88%, 89%, 90%, 91%, 92%, 93%, 94%, 95%, 96%, 97%, 98% or 99% identical to the sequence set forth in SEQ ID NO: 372. In certain embodiments, the anti-IgE antigen-binding fragment transgene encodes an antigen-binding fragment comprising a light chain comprising an amino acid sequence that is at least 85%, 86%, 87%, 88%, 89%, 90%, 91%, 92%, 93%, 94%, 95%, 96%, 97%, 98% or 99% identical to the sequence set forth in SEQ ID NO: 373 and a heavy chain comprising an amino acid sequence that is at least 85%, 86%, 87%, 88%, 89%, 90%, 91%, 92%, 93%, 94%, 95%, 96%, 97%, 98% or 99% identical to the sequence set forth in SEQ ID NO: 372. In specific embodiments, the IgE antigen binding fragment comprises a heavy chain comprising an amino acid sequence of SEQ ID NO: 372 with 1, 2, 3, 4, 5, 6, 7, 8, 9, 10, 11, 12, 13, 14, 15 or more amino acid substitutions, insertions or deletions, and the substitutions, insertions or deletions are made, e.g., in the framework regions (e.g., those regions outside of the CDRs, which CDRs are underlined in FIG. 29E) or are substitutions with an amino acid present at that position in the heavy chain of one or more of the other therapeutic antibodies, for example, as identified by the alignment in FIG. 20A. In specific embodiments, the IgE antigen binding fragment comprises a light chain comprising an amino acid sequence of SEQ ID NO: 373 with 1, 2, 3, 4, 5, 6, 7, 8, 9, 10, 11, 12, 13, 14, 15 or more amino acid substitutions, insertions or deletions, and the substitutions, insertions or deletions are made, e.g., in the framework regions (e.g., those regions outside of the CDRs, which CDRs are underlined in FIG. 29E) or are substitutions with an amino acid present at that position in the light chain of one or more of the other therapeutic antibodies, for example, as identified by the alignment in FIG. 20B.

[1171] In certain embodiments, the anti-IgE antigen-binding fragment transgene encodes a hyperglycosylated omalizumab Fab, comprising a heavy chain and a light chain of SEQ ID NOs: 372 and 373, respectively, with one or more of the following mutations: L116N (heavy chain) and/or Q164N and/or Q164S and/or E199N (light chain) (see FIGS. 20A (heavy chain) and 20B (light chain)).

[1172] In certain embodiments, the anti-IgE antigen-binding fragment transgene encodes an antigen-binding fragment and comprises the nucleotide sequences encoding the six omalizumab CDRs which are underlined in the heavy and light chain variable domain sequences of FIG. 29E which are spaced between framework regions, generally human framework regions, and associated with constant domains depending upon the form of the antigen-binding molecule, as is known in the art to form the heavy and/or light chain variable domain of an anti-IgE antibody or antigen-binding fragment thereof.

[1173] In certain embodiments, the anti-TSLP antigen-binding fragment transgene comprises the nucleotide sequences encoding the heavy and light chains of the Fab portion of tezepelumab (having amino acid sequences of SEQ ID NOs. 374 and 375, respectively, see Table 5 and FIG. 29F). The nucleotide sequences may be codon optimized for expression in human cells. Nucleotide sequences may, for example, comprise the nucleotide sequences of SEQ ID NO: 390 (encoding the tezepelumab heavy chain Fab portion) and SEQ ID NO: 391 (encoding the tezepelumab light chain Fab portion) as set forth in Table 6. The heavy and light chain sequences both have a signal or leader sequence at the N-terminus appropriate for expression and secretion in human cells, in particular, human liver cells (e.g., hepatocytes) or muscle cells. The signal sequence may have the amino acid sequence of MYRMQLLLLIALSLALVTNS (SEQ ID NO: 146). Alternatively, the signal sequence may have an amino acid sequence selected from any one of the signal sequences set forth in Table 3 or 4 that correspond to the proteins secreted by myocytes or hepatocytes, respectively.

[1174] In addition to the heavy and light chain variable domain and C_{H}1 and C_{L} domain sequences, the transgenes may comprise, at the C-terminus of the heavy chain C_{H}1 domain sequence, all or a portion of the hinge region. In specific embodiments, the anti-TSLP-antigen binding domain has a heavy chain Fab domain of SEQ ID NO: 374 with additional hinge region sequence starting after the C-terminal valine (V), contains all or a portion of the amino acid sequence ERKCCVECPPCPAPPVAG (SEQ ID NO: 220) or ERKCCVECPPCPA (SEQ ID NO: 221) as set forth in FIG. 29E. These hinge regions may be encoded by nucleotide sequences at the 3′ end of SEQ ID NO: 390 by the hinge region encoding sequences set forth in Table 6 (SEQ ID NO: 390). In another embodiment, the transgenes comprise the amino acid sequences encoding the full length (or substantially full length) heavy and light chains of the antibody, comprising the Fc domain at the C terminus of the heavy chain, e.g. having an amino acid sequence of an IgG2 Fc domain, such as SEQ ID NO: 284 or as depicted in FIG. 23, or a mutant or variant thereof. The Fc domain may be engineered for altered binding to one or more Fc receptors and/or effector function as disclosed in Section 5.1.9, infra.

[1175] In certain embodiments, the anti-TSLP antigen-binding fragment transgene encodes an TSLP antigen-binding fragment comprising a light chain comprising an amino acid sequence that is at least 85%, 86%, 87%, 88%, 89%, 90%, 91%, 92%, 93%, 94%, 95%, 96%, 97%, 98% or 99% identical to the sequence set forth in SEQ ID NO: 375. In certain embodiments, the anti-TSLP antigen-binding fragment transgene encodes an TSLP antigen-binding fragment comprising a heavy chain comprising an amino acid sequence that is at least 85%, 86%, 87%, 88%, 89%, 90%, 91%, 92%, 93%, 94%, 95%, 96%, 97%, 98% or 99% identical to the sequence set forth in SEQ ID NO: 374. In certain embodiments, the anti-TSLP antigen-binding fragment transgene encodes an antigen-binding fragment comprising a light chain comprising an amino acid sequence that is at least 85%, 86%, 87%, 88%, 89%, 90%, 91%, 92%, 93%, 94%, 95%, 96%, 97%, 98% or 99% identical to the sequence set forth in SEQ ID NO: 375 and a heavy chain comprising an amino acid sequence that is at least 85%, 86%, 87%, 88%, 89%, 90%, 91%, 92%, 93%, 94%, 95%, 96%, 97%, 98% or 99% identical to the sequence set forth in SEQ ID NO: 374. In specific embodiments, the TSLP antigen binding fragment comprises a heavy chain comprising an amino acid sequence of SEQ ID NO: 374 with 1, 2, 3, 4, 5, 6, 7, 8, 9, 10, 11, 12, 13, 14, 15 or more amino acid substitutions, insertions or deletions, and the substitutions, insertions or deletions are made, e.g., in the framework regions (e.g., those regions outside of the CDRs, which CDRs are underlined in FIG. 29F) or are substitutions with an amino acid present at that position in the heavy chain of one or more of the other therapeutic antibodies, for example, as identified by the alignment in FIG. 20A. In specific embodiments, the TSLP antigen binding fragment comprises a light chain comprising an amino acid sequence of SEQ ID NO: 375 with 1, 2, 3, 4, 5, 6, 7, 8, 9, 10, 11, 12, 13, 14, 15 or more amino acid substitutions, insertions or deletions, and the substitutions, insertions or deletions are made, e.g., in the framework regions (e.g., those regions outside of the CDRs, which CDRs are underlined in FIG. 29F) or are substitutions with an amino acid present at that position in the light chain of one or more of the other therapeutic antibodies, for example, as identified by the alignment in FIG. 20B.

[1176] In certain embodiments, the anti-TSLP antigen-binding fragment transgene encodes a hyperglycosylated tezepelumab Fab, comprising a heavy chain and a light chain of SEQ ID NOs: 374 and 375, respectively, with one or more of the following mutations: M117N (heavy chain) and/or and/or Q196N (light chain) (see FIGS. 20A (heavy chain) and 20B (light chain)).

[1177] In certain embodiments, the anti-TSLP antigen-binding fragment transgene encodes an antigen-binding fragment and comprises the nucleotide sequences encoding the six tezepelumab CDRs which are underlined in the heavy and light chain variable domain sequences of FIG. 29F which are spaced between framework regions, generally human framework regions, and associated with constant domains depending upon the form of the antigen-binding molecule, as is known in the art to form the heavy and/or light chain variable domain of an anti-TSLP antibody or antigen-binding fragment thereof.

[1178] Gene Therapy Methods

[1179] Provided are methods of treating human subjects for angioedema by administration of a viral vector containing a transgene encoding an anti-IL/ILR, anti-IgE, or anti-TSLP antibody, or antigen binding fragment thereof. The antibody may be benralizumab, reslizumab, tralokinumab, nemolizumab, omalizumab, or tezepelumab and is, e.g., a full length or substantially full length antibody or Fab fragment thereof, or other antigen-binding fragment thereof. In embodiments, the patient has been diagnosed with and/or has symptoms associated with AI-Ds. Recombinant vectors used for delivering the transgene are described in Section 5.4.2. Such vectors should have a tropism for human liver or muscle cells and can include non-replicating rAAV, particularly those bearing an AAV8 or AAV9 capsid. The recombinant vectors, such as shown in FIGS. 29A-29F, can be administered in any manner such that the recombinant vector enters the liver or muscle tissue, e.g., by introducing the recombinant vector into the bloodstream. See Section 5.5.2 for details regarding the methods of treatment.

[1180] Subjects to whom such gene therapy is administered can be those responsive to anti-IL/ILR, anti-IgE, or anti-TSLP therapy. In certain embodiments, the methods encompass treating patients who have been diagnosed with AI-Ds, or have one or more symptoms associated therewith, and identified as responsive to treatment with an anti-IL/ILR, anti-IgE, or anti-TSLP antibody or considered a good candidate for therapy with an anti-IL/ILR, anti-IgE, or anti-TSLP antibody In specific embodiments, the patients have previously been treated with dupilumab, ixekizumab, secukinumab, ustekinumab, mepolizumab, benralizumab, reslizumab, tralokinumab, nemolizumab, omalizumab, or tezepelumab and have been found to be responsive to dupilumab, ixekizumab, secukinumab, ustekinumab, mepolizumab, benralizumab, reslizumab, tralokinumab, nemolizumab, omalizumab, or tezepelumab. To determine responsiveness, the anti-IL/ILR, anti-IgE, or anti-TSLP antibody or antigen-binding fragment transgene product (e.g., produced in cell culture, bioreactors, etc.) may be administered directly to the subject.

[1181] Human Post Translationally Modified Antibodies

[1182] The production of the anti-IL/ILR, anti-IgE, or anti-TSLP HuPTM mAb or HuPTM Fab, should result in a “biobetter” molecule for the treatment of angioedema accomplished via gene therapy—e.g., by administering a viral vector or other DNA expression construct encoding the anti-IL/ILR, anti-IgE, or anti-TSLP HuPTM Fab, intravenously to human subjects (patients) diagnosed with or having one or more symptoms of angioedema, to create a permanent depot in the liver or muscle tissue that continuously supplies the fully-human post-translationally modified, e.g., human-glycosylated, sulfated transgene product produced by transduced liver or muscle cells.

[1183] In specific embodiments, the anti-IL5 HuPTM mAb or antigen-binding fragment thereof has heavy and light chains with the amino acid sequences of the heavy and light chain Fab portions of benralizumab as set forth in FIG. 29A (with glutamine (Q) glycosylation sites; asparaginal (N) glycosylation sites, non-consensus asparaginal (N) glycosylation sites; and tyrosine-O-sulfation sites (Y) are as indicated in the legend) has a glycosylation, particularly a 2,6-sialylation, at one or more of the amino acid positions Q113 and/or N163 of the heavy chain (SEQ ID NO: 364) or Q100, N158, and/or N210 of the light chain (SEQ ID NO: 365). Alternatively or in addition to, the HuPTM mAb or antigen binding-fragment thereof with the heavy and light chain variable domain sequences of benralizumab has a sulfation group at Y94 of the heavy chain (SEQ ID NO: 364) and/or Y86 and/or Y87 of the light chain (SEQ ID NO: 365). In other embodiments, the anti-IL5 HuPTM mAb or antigen-binding fragment thereof does not contain detectable NeuGc moieties and/or does not contain detectable alpha-Gal moieties. In certain embodiments, the HuPTM mAb is a full length or substantially full length mAb with an Fc region.

[1184] In specific embodiments, the anti-IL5R HuPTM mAb or antigen-binding fragment thereof has heavy and light chains with the amino acid sequences of the heavy and light chain Fab portions of reslizumab as set forth in FIG. 29B (with glutamine (Q) glycosylation sites; asparaginal (N) glycosylation sites, non-consensus asparaginal (N) glycosylation sites; and tyrosine-O-sulfation sites (Y) are as indicated in the legend) has a glycosylation, particularly a 2,6-sialylation, at one or more of the amino acid positions N35, Q108, N158, and/or N200 of the heavy chain (SEQ ID NO: 366) or Q100, N158, and/or N210 of the light chain (SEQ ID NO: 367). Alternatively or in addition to, the HuPTM mAb or antigen binding-fragment thereof with the heavy and light chain variable domain sequences of reslizumab has a sulfation group at Y93 and/or Y94 of the heavy chain (SEQ ID NO: 366) and/or Y86 and/or Y87 of the light chain (SEQ ID NO: 367). In other embodiments, the anti-IL5R HuPTM mAb or antigen-binding fragment thereof does not contain detectable NeuGc moieties and/or does not contain detectable alpha-Gal moieties. In certain embodiments, the HuPTM mAb is a full length or substantially full length mAb with an Fc region.

[1185] In specific embodiments, the anti-IL13 HuPTM mAb or antigen-binding fragment thereof has heavy and light chains with the amino acid sequences of the heavy and light chain Fab portions of tralokinumab as set forth in FIG. 29C (with glutamine (Q) glycosylation sites; asparaginal (N) glycosylation sites, non-consensus asparaginal (N) glycosylation sites; and tyrosine-O-sulfation sites (Y) are as indicated in the legend) has a glycosylation, particularly a 2,6-sialylation, at one or more of the amino acid positions N54, N164, and/or N206 of the heavy chain (SEQ ID NO: 368) or N68 and/or N172 of the light chain (SEQ ID NO: 369). Alternatively or in addition to, the HuPTM mAb or antigen binding-fragment thereof with the heavy and light chain variable domain sequences of tralokinumab has a sulfation group at Y94 and/or Y95 of the heavy chain (SEQ ID NO: 368) and/or Y86 the light chain (SEQ ID NO: 369). In other embodiments, the anti-IL13 HuPTM mAb or antigen-binding fragment thereof does not contain detectable NeuGc moieties and/or does not contain detectable alpha-Gal moieties. In certain embodiments, the HuPTM mAb is a full length or substantially full length mAb with an Fc region.

[1186] In specific embodiments, the anti-IL31RA HuPTM mAb or antigen-binding fragment thereof has heavy and light chains with the amino acid sequences of the heavy and light chain Fab portions of nemolizumab as set forth in FIG. 29D (with glutamine (Q) glycosylation sites; asparaginal (N) glycosylation sites, non-consensus asparaginal (N) glycosylation sites; and tyrosine-O-sulfation sites (Y) are as indicated in the legend) has a glycosylation, particularly a 2,6-sialylation, at one or more of the amino acid positions Q113, N163, N196, and/or N205 of the heavy chain (SEQ ID NO: 370) or N158 and/or N210 of the light chain (SEQ ID NO: 371). Alternatively or in addition to, the HuPTM mAb or antigen binding-fragment thereof with the heavy and light chain variable domain sequences of nemolizumab has a sulfation group at Y94 and/or Y95 of the heavy chain (SEQ ID NO: 370) and/or Y86 and/or Y87 the light chain (SEQ ID NO: 371). In other embodiments, the anti-IL31RA HuPTM mAb or antigen-binding fragment thereof does not contain detectable NeuGc moieties and/or does not contain detectable alpha-Gal moieties. In certain embodiments, the HuPTM mAb is a full length or substantially full length mAb with an Fc region.

[1187] In specific embodiments, the anti-IL31RA HuPTM mAb or antigen-binding fragment thereof has heavy and light chains with the amino acid sequences of the heavy and light chain Fab portions of nemolizumab as set forth in FIG. 29D (with glutamine (Q) glycosylation sites; asparaginal (N) glycosylation sites, non-consensus asparaginal (N) glycosylation sites; and tyrosine-O-sulfation sites (Y) are as indicated in the legend) has a glycosylation, particularly a 2,6-sialylation, at one or more of the amino acid positions Q113, N163, N196, and/or N205 of the heavy chain (SEQ ID NO: 370) or N158 and/or N210 of the light chain (SEQ ID NO: 371). Alternatively or in addition to, the HuPTM mAb or antigen binding-fragment thereof with the heavy and light chain variable domain sequences of nemolizumab has a sulfation group at Y94 and/or Y95 of the heavy chain (SEQ ID NO: 370) and/or Y86 and/or Y87 the light chain (SEQ ID NO: 371). In other embodiments, the anti-IL31RA HuPTM mAb or antigen-binding fragment thereof does not contain detectable NeuGc moieties and/or does not contain detectable alpha-Gal moieties. In certain embodiments, the HuPTM mAb is a full length or substantially full length mAb with an Fc region.

[1188] In specific embodiments, the anti-IgE HuPTM mAb or antigen-binding fragment thereof has heavy and light chains with the amino acid sequences of the heavy and light chain Fab portions of omalizumab as set forth in FIG. 29E (with glutamine (Q) glycosylation sites; asparaginal (N) glycosylation sites, non-consensus asparaginal (N) glycosylation sites; and tyrosine-O-sulfation sites (Y) are as indicated in the legend) has a glycosylation, particularly a 2,6-sialylation, at one or more of the amino acid positions N36, N59, N77, Q113, and/or N159 of the heavy chain (SEQ ID NO: 372) or Q104, N162, and/or N214 of the light chain (SEQ ID NO: 373). Alternatively or in addition to, the HuPTM mAb or antigen binding-fragment thereof with the heavy and light chain variable domain sequences of omalizumab has a sulfation group at Y94 and/or Y95 of the heavy chain (SEQ ID NO: 372) and/or Y90 and/or Y91 the light chain (SEQ ID NO: 373). In other embodiments, the anti-IgE HuPTM mAb or antigen-binding fragment thereof does not contain detectable NeuGc moieties and/or does not contain detectable alpha-Gal moieties. In certain embodiments, the HuPTM mAb is a full length or substantially full length mAb with an Fc region.

[1189] In specific embodiments, the anti-TSLP HuPTM mAb or antigen-binding fragment thereof has heavy and light chains with the amino acid sequences of the heavy and light chain Fab portions of tezepelumab as set forth in FIG. 29F (with glutamine (Q) glycosylation sites; asparaginal (N) glycosylation sites, non-consensus asparaginal (N) glycosylation sites; and tyrosine-O-sulfation sites (Y) are as indicated in the legend has a glycosylation, particularly a 2,6-sialylation, at one or more of the amino acid positions N77, N80, Q114, N164, N197, and/or N206 of the heavy chain (SEQ ID NO: 374) or N68 and/or N172 of the light chain (SEQ ID NO: 375). Alternatively or in addition to, the HuPTM mAb or antigen binding-fragment thereof with the heavy and light chain variable domain sequences of tezepelumab has a sulfation group at Y94 and/or Y95 of the heavy chain (SEQ ID NO: 374) and/or Y85 and/or Y86 the light chain (SEQ ID NO: 375). In other embodiments, the anti-TSLP HuPTM mAb or antigen-binding fragment thereof does not contain detectable NeuGc moieties and/or does not contain detectable alpha-Gal moieties. In certain embodiments, the HuPTM mAb is a full length or substantially full length mAb with an Fc region.

[1190] In certain embodiments, the HuPTM mAb or Fab (or a hyperglycosylated derivative of either) is therapeutically effective and is at least 0.5%, 1% or 2% glycosylated and/or sulfated and may be at least 5%, 10% or even 50% or 100% glycosylated and/or sulfated. The goal of gene therapy treatment provided herein is to slow or arrest the progression of AI-Ds, reduce the levels of pain or discomfort for the patient.

[1191] Efficacy may be monitored by scoring the symptoms or degree of inflammation in the affected tissue or area of the body, e.g., such as the skin. With regard to atopic dermatitis, efficacy can be monitored by assessing changes in the affected skin or in the quality of the patient's life over the course of treatment. One or more standardized assessments can be used to assess the change. (see e.g., Physician Global Assessment (PGA), lattice system, NPF Psoriasis Score (NPF-PS), Medical Outcome Survey Short Form 36 (SF-36), the Euro QoL, Dermatology Life Quality Index (DLQI), and the Skindex; Schram et al. (2012) Allergy; 67: 99-106: “EASI, (objective) SCORAD and POEM for atopic eczema: responsiveness and minimal clinically important difference” describing standardized assessments including Eczema Area and Severity Index (EASI) and the Severity Scoring of Atopic Dermatitis Index (SCORAD)). With regard to COPD and asthma, efficacy may be monitored by assessing changes in symptoms or by measuring airway function by peak expiratory flow (PEV) or spirometry (e.g. FEV1). With regard to eosinophilic asthma, efficacy can be monitored by assessing changes in asthma exacerbations, and in lung function (e.g. airflow obstruction, forced vital capacity, and residual volume), and asthma control. With regard to chronic idiopathic urticaria, efficacy can be monitored by assessing changes in the affected skin or changes in the degree of swelling of the lips, eyelids, or throat.

[1192] Combinations of delivery of the anti-IL/ILR, anti-IgE, or anti-TSLP HuPTM mAb or antigen-binding fragment thereof, to the liver or muscle accompanied by delivery of other available treatments are encompassed by the methods provided herein. The additional treatments may be administered before, concurrently, or subsequent to the gene therapy treatment. Available treatments for subject AI-Ds that could be combined with the gene therapy provided herein include but are not limited to antihistamines, H2 blockers, topical corticosteroids, or antidepressants for chronic idiopathic urticaria, aminosalicylates, immunomodulatory agents (e.g., azathioprine (AZA), 6-mercaptopurine (6-MP), methotrexate (MTX)), oral or topical corticosteroids (e.g., prednisone or budesonide), topical calcineurin inhibitors, inhaled corticosteroids for asthma or COPD, leukotriene modifiers, high-dose inhaled corticosteroids, and oral corticosteroids, and/or topical steroids for atopic dermatitis and administration with anti-IL/ILR, anti-IgE, or anti-TSLP agents, including but not limited to dupilumab, ixekizumab, secukinumab, ustekinumab, mepolizumab, benralizumab, reslizumab, tralokinumab, nemolizumab, omalizumab, or tezepelumab.

### 5.3.20 HuPTM Constructs and Formulations for Non-Infectious Uveitis

[1193] Compositions and methods are described for the delivery of HuPTM mAbs and antigen-binding fragments thereof, such as HuPTM Fabs, that bind to interleukin-6 receptor (IL6R), interleukin-6 (IL6), TNFα, or C5, derived from an anti-IL6R, anti-IL6, anti-TNFα, or anti-C5 antibody, such as satralizumab, sarilumab, tocilizumab, siltuximab, clazakizumab, sirukumab, olokizumab, gerilimzumab, tesidolumab, ravulizumab, adalimumab, infliximab, or golimumab (FIGS. 10B and 10D, 12A-12C, and 16A-I), indicated for treating uveitis, preferably non-infectious posterior uveitis (NIU).

[1194] In certain embodiments, provided are methods of treating panuveitis or intermediate uveitis, including associated with NIU. Accordingly, methods of treatment of NIU and panuveitis and intermediate uveitis are also provided. Uveitis is inflammation in the eye and may be associated with systemic autoimmune disorders, including Behcet's disease, sarcoidosis, juvenile chronic arthritis, Vogt-Koyanagi-Harada syndrome, multiple sclerosis, and other autoimmune indications, particularly T cell-mediated autoimmune indications. In other embodiments, the NIU is associated with ocular autoimmune disease, such as, birdshot retinochoroidopathy, multifocal choroiditis, and other white dot syndromes. Methods of treatment include methods of inhibiting, and reducing the progression of vision loss and ocular damage, such as macular scarring or atrophy, lamellar macular hole formation and optic atrophy. In particular, the method of treatment may improve visual acuity (for example, defined by the best corrected visual acuity (BCVA) score or slow the loss of visual acuity and or ocular damage. Other manifestations of NIU include vitreous haze, macular retinitis and vasculitis. Accordingly, provided are methods of treating, reducing the severity of and reducing the progression of vitreous haze, macular retinitis and/or vasculitis associated with NIU by administering the HuPTM.

[1195] In certain embodiments, the HuPTM mAb has the amino acid sequence of satralizumab, sarilumab, tocilizumab, siltuximab, clazakizumab, sirukumab, olokizumab, gerilimzumab, tesidolumab, ravulizumab, adalimumab, infliximab, or golimumab, or an antigen binding fragment thereof. Amino acid sequences of Fab fragments of the antibody are provided in FIG. 10B, 10D, 12A-12C, or 16A-I. Delivery may be accomplished via gene therapy—e.g., by administering a viral vector or other DNA expression construct encoding an IL6R-binding, IL6-binding, TNFα-binding, or C5-binding HuPTM mAb (or an antigen binding fragment and/or a hyperglycosylated derivative or other derivative, thereof) to patients (human subjects) diagnosed with one or more symptoms of non-infectious uveitis to create a permanent depot that continuously supplies the human PTM, e.g., human-glycosylated, transgene product.

[1196] Transgenes

[1197] Provided are recombinant vectors containing a transgene encoding a HuPTM mAb or HuPTM Fab (or other antigen binding fragment of the HuPTM mAb) that binds to IL6R, IL6, TNFα, or C5 that can be administered to deliver the HuPTM mAb or antigen binding fragment in a patient. The transgene is a nucleic acid comprising the nucleotide sequences encoding an antigen binding fragment of an antibody that binds to IL6R, IL6, TNFα, or C5, such as satralizumab, sarilumab, tocilizumab, siltuximab, clazakizumab, sirukumab, olokizumab, gerilimzumab, tesidolumab, ravulizumab, adalimumab, infliximab, golimumab, or variants thereof as detailed herein. The transgene may also encode an anti-IL6R, anti-TNFα, or anti-C5 antigen binding fragment that contains additional glycosylation sites (e.g., see Courtois et al.) Transgenes are described in detail in Sections 5.3.9, 5.3.11, or 5.3.15 above.

[1198] In preferred embodiments, the antibody that binds to TNFα is adalimumab, or variants thereof as described herein. For example, a full length or Fab adalimumab antibody may be delivered by administering an adeno-associated virus (AAV) vector encoding an adalimumab mAb (or an antigen binding fragment and/or a hyperglycosylated derivative or other derivative, thereof), such as CAG.adalimumab.IgG (SEQ ID NO: 451) or CAG.adalimumab.Fab (SEQ ID NO: 453).

[1199] Sequences encoding the anti-C5, anti-IL6R, anti-IL6, or and TNF-α antigen binding fragment transgenes can be found in Table 5 (amino acid) or Table 6 (nucleotide) or FIG. 10A, 10D, 12A-12C, or 16A-16I. The heavy and light chain sequences both have a signal or leader sequence at the N-terminus appropriate for expression and secretion in human cells, in particular, one or more cells forming the retina. The signal sequence may have the amino acid sequence of MYRMQLLLLIALSLALVTNS (SEQ ID NO: 146). Alternatively, the signal sequence may have an amino acid sequence selected from any one of the signal sequences set forth in Table 2 that correspond to the proteins secreted by one or more cells forming the retina. Alternatively, the signal sequence may be appropriate for expression in muscle or liver cells, such as those listed in Tables 3 and 4 infra.

[1200] The anti-C5, anti-IL6, anti-IL6R, or anti-TNFα antigen binding domain can have heavy chain Fab domain of SEQ ID NOS: 39, 362, 45, 47, 49, 331, 333, 335, 337, 339, 341, 59, or 61 with additional hinge region sequence starting after the C-terminal valine (V), contains all or a portion of the amino acid sequences as set forth in FIG. 10B, 10D, 12A-C, or 16A-16I and as described in detail in Sections 5.3.9, 5.3.11, or 5.3.15.

[1201] In another embodiment, the transgenes comprise the amino acid sequences encoding the full length (or substantially full length) heavy and light chains of the antibody, comprising the Fc domain at the C terminus of the heavy chain, e.g., having an amino acid sequence of SEQ ID NOS: 301, 303, 304, 305, 309, 310, 355-359, or 394-398 (Table 7) or an IgG1, IgG2, or IgG4 Fc domain, such as SEQ ID No. 283, 284, or 285 or as depicted in FIG. 23, or a mutant or variant thereof. The Fc domain may be engineered for altered binding to one or more Fc receptors and/or effector function as disclosed in Section 5.1.9, infra.

[1202] The anti-C5, anti-IL6, anti-IL6R, or anti-TNFα antigen binding domain can have light chain Fab domain of SEQ ID NOS: 40, 363, 46, 48, 50, 332, 334, 336, 338, 340, 342, 60, or 62 with additional hinge region sequence starting after the C-terminal valine (V), contains all or a portion of the amino acid sequences as set forth in FIG. 10B, 10D, 12A-C, or 16A-16I and as described in detail in Sections 5.3.9, 5.3.11, or 5.3.15.

[1203] In certain embodiments, the anti-C5, anti-IL6, anti-IL6R, or anti-TNFα antigen-binding fragment transgene encodes an C5, IL6, IL6R, or TNFα antigen-binding fragment comprising a light chain comprising an amino acid sequence that is at least 85%, 86%, 87%, 88%, 89%, 90%, 91%, 92%, 93%, 94%, 95%, 96%, 97%, 98% or 99% identical to the sequences set forth in SEQ ID NOS: 40, 363, 46, 48, 50, 332, 334, 336, 338, 340, 342, 60, or 62. In certain embodiments, the anti-C5, anti-IL6, anti-IL6R, or anti-TNFα antigen-binding fragment transgene encodes an C5, IL6, IL6R, or TNFα antigen-binding fragment comprising a heavy chain comprising an amino acid sequence that is at least 85%, 86%, 87%, 88%, 89%, 90%, 91%, 92%, 93%, 94%, 95%, 96%, 97%, 98% or 99% identical to the sequences set forth in SEQ ID NOS: 39, 362, 45, 47, 49, 331, 333, 335, 337, 339, 341, 59, or 61. In certain embodiments, the anti-C5, anti-IL6, anti-IL6R, or anti-TNFα antigen-binding fragment transgene encodes an antigen-binding fragment comprising a light chain comprising an amino acid sequence that is at least 85%, 86%, 87%, 88%, 89%, 90%, 91%, 92%, 93%, 94%, 95%, 96%, 97%, 98% or 99% identical to the sequences set forth in SEQ ID NOS: 40, 363, 46, 48, 50, 332, 334, 336, 338, 340, 342, 60, or 62 and a heavy chain comprising an amino acid sequence that is at least 85%, 86%, 87%, 88%, 89%, 90%, 91%, 92%, 93%, 94%, 95%, 96%, 97%, 98% or 99% identical to the sequence set forth in SEQ ID NO: 39, 362, 45, 47, 49, 331, 333, 335, 337, 339, 341, 59, or 61. In specific embodiments, the anti-C5, anti-IL6, anti-IL6R, or anti-TNFα antigen binding fragment comprises a heavy chain comprising an amino acid sequence of SEQ ID NOS: 39, 362, 45, 47, 49, 331, 333, 335, 337, 339, 341, 59, or 61 with 1, 2, 3, 4, 5, 6, 7, 8, 9, 10, 11, 12, 13, 14, 15 or more amino acid substitutions, insertions or deletions, and the substitutions, insertions or deletions are made, e.g., in the framework regions (e.g., those regions outside of the CDRs, which CDRs are underlined in FIG. 10B, 10D, 12A-C, or 16A-I) or are substitutions with an amino acid present at that position in the heavy chain of one or more of the other therapeutic antibodies, for example, as identified by the alignment in FIG. 20A. In specific embodiments, the C5, IL6, IL6R, or TNFα antigen binding fragment comprises a light chain comprising an amino acid sequence of SEQ ID NOS: 40, 363, 46, 48, 50, 332, 334, 336, 338, 340, 342, 60, or 62 with 1, 2, 3, 4, 5, 6, 7, 8, 9, 10, 11, 12, 13, 14, 15 or more amino acid substitutions, insertions or deletions, and the substitutions, insertions or deletions are made, e.g., in the framework regions (e.g., those regions outside of the CDRs, which CDRs are underlined in FIG. 10B, 10D, 12A-C, or 16A-I) or are substitutions with an amino acid present at that position in the light chain of one or more of the other therapeutic antibodies, for example, as identified by the alignment in FIG. 20B.

[1204] In certain embodiments, the anti-C5, anti-IL6, anti-IL6R, or anti-TNFα antigen-binding fragment transgene encodes a hyperglycosylated Fab, comprising a heavy chain and a light chain of SEQ ID NOs: 39 and 40, 362 and 363, 45 and 46, 47 and 48, 49 and 50, 331 and 332, 333 and 334, 335 and 336, 337 and 338, 339 and 340, 341 and 342, 59 and 60, or 61 and 62, respectively, with one or more of the following mutations as indicated in FIGS. 20A (heavy chain) and 20B (light chain).

[1205] In certain embodiments, the anti-C5, anti-IL6, anti-IL6R, or anti-TNFα antigen-binding fragment transgene encodes an antigen-binding fragment and comprises the nucleotide sequences encoding the six CDRs which are underlined in the heavy and light chain variable domain sequences of FIG. 10B, 10D, 12A-12C, or 16A-16I which are spaced between framework regions, generally human framework regions, and associated with constant domains depending upon the form of the antigen-binding molecule, as is known in the art to form the heavy and/or light chain variable domain of an anti-C5, anti-IL6, anti-IL6R, or anti-TNFα antibody or antigen-binding fragment thereof.

[1206] Gene Therapy Methods

[1207] Also provided are methods of treating human subjects for non-infectious uveitis by administration of a viral vector containing a transgene encoding an anti-IL6R, anti-IL6, anti-TNFα, or anti-C5 antibody, or antigen binding fragment thereof. The antibody may be satralizumab, sarilumab, tocilizumab, siltuximab, clazakizumab, sirukumab, olokizumab, gerilimzumab, tesidolumab, ravulizumab, adalimumab, infliximab, or golimumab, and is, e.g., a Fab fragment thereof, or other antigen-binding fragment thereof.

[1208] In embodiments, the patient has been diagnosed with and/or has symptom(s) associated with non-infectious uveitis. Recombinant vectors used for delivering the transgene are described in Section 5.4.3. Such vectors should have a tropism for human retina-type cells and can include non-replicating rAAV, particularly those bearing an AAV8 capsid. Alternatively, vectors bearing an AAV2.7m8 or AAV9 capsid can be used for ocular indications. The recombinant vectors, such as the ones shown in FIG. 10B, 10D, 12A-C, or 16A-I, can be administered in any manner such that the recombinant vector enters the retina, e.g., by introducing the recombinant vector into the eye. See Section 5.5.3 for details regarding the methods of treatment.

[1209] Subjects to whom such gene therapy is administered can be those responsive to anti-IL6R, anti-IL6, anti-TNFα, or anti-C5 therapy. In certain embodiments, the methods encompass treating patients who have been diagnosed with non-infectious uveitis, or have one or more symptoms associated therewith, and identified as responsive to treatment with anti-IL6R, anti-IL6, anti-TNFα, or anti-C5 antibody or considered a good candidate for therapy with an anti-IL6R, anti-IL6, anti-TNFα, or anti-C5 antibody. In specific embodiments, the patients have previously been treated with satralizumab, sarilumab, tocilizumab, siltuximab, clazakizumab, sirukumab, olokizumab, gerilimzumab, tesidolumab, ravulizumab, adalimumab, infliximab, or golimumab, or inebilizumab, and have been found to be responsive to satralizumab, sarilumab, tocilizumab, siltuximab, clazakizumab, sirukumab, olokizumab, gerilimzumab, tesidolumab, ravulizumab, adalimumab, infliximab, or golimumab. In other embodiments, the patients have been previously treated with an anti-IL6R, anti-IL6, anti-TNFα, or anti-C5 antibody. To determine responsiveness, the anti-IL6R, anti-IL6, anti-TNFα, or anti-C5 antibody or antigen-binding fragment transgene product (e.g., produced in cell culture, bioreactors, etc.) may be administered directly to the subject.

[1210] Human Post Translationally Modified Antibodies

[1211] The production of the anti-IL6R, anti-IL6, anti-TNFα, or anti-C5 HuPTM mAb or HuPTM Fab, should result in a “biobetter” molecule for the treatment of non-infectious uveitis accomplished via gene therapy—e.g., by administering a viral vector or other DNA expression construct encoding the anti-IL6R, anti-IL6, anti-TNFα, or anti-C5 HuPTM Fab, subretinally, intravitreally, or suprachoroidally to human subjects (patients) diagnosed with or having one or more symptoms of non-infectious uveitis, to create a permanent depot in the retina that continuously supplies the fully-human post-translationally modified, e.g., human-glycosylated, sulfated transgene product produced by transduced cells of the retina.

[1212] In certain embodiments, the HuPTM mAb or Fab is therapeutically effective and is at least 0.5%, 1% or 2% glycosylated and/or sulfated and may be at least 5%, 10% or even 50% or 100% glycosylated and/or sulfated. The goal of gene therapy treatment provided herein is to slow or arrest the progression of or relieve one or more symptoms of non-infectious uveitis, such as to reduce the levels of pain, redness of the eye, sensitivity to light, and/or other discomfort for the patient. Efficacy may be monitored by measuring a reduction in pain, redness of the eye, and/or photophobia and/or an improvement in vision. Efficacy may also be assessed by monitoring best corrected visual acuity (BCVA) and/or performing applanation tonometry, slit-lamp examination of the anterior and posterior segments, dilated indirect ophthalmoscopy, and optical coherence tomography (OTC), and comparing to baseline values.

[1213] In specific embodiments, the anti-C5, anti-IL6, anti-IL6R, or anti-TNFα HuPTM mAb or antigen-binding fragment thereof has heavy and light chains with the amino acid sequences of the heavy and light chain Fab portions as set forth in FIG. 10B, 10D, 12A-12C, or 16A-16I (with glutamine (Q) glycosylation sites; asparaginal (N) glycosylation sites, non-consensus asparaginal (N) glycosylation sites; and tyrosine-O-sulfation sites (Y) are as indicated in the legend) has a glycosylation, particularly a 2,6-sialylation, at one or more of the amino acid positions. Alternatively or in addition to, the HuPTM mAb or antigen binding-fragment thereof with the heavy and light chain variable domain sequences has a sulfation group of the heavy chain and/or of the light chain. In other embodiments, the anti-C5, anti-IL6, anti-IL6R, or anti-TNFα HuPTM mAb or antigen-binding fragment thereof does not contain detectable NeuGc moieties and/or does not contain detectable alpha-Gal moieties. In certain embodiments, the HuPTM mAb is a full length or substantially full length mAb with an Fc region. See Sections 5.3.9, 5.3.11, or 5.3.15 for a detailed description of Y-sulfation sites and other post-translational modifications.

[1214] In certain embodiments, the HuPTM mAb or Fab is therapeutically effective and is at least 0.5%, 1% or 2% glycosylated and/or sulfated and may be at least 5%, 10% or even 50% or 100% glycosylated and/or sulfated. The goal of gene therapy treatment provided herein is to slow or arrest the progression of or relieve one or more symptoms of non-infectious uveitis. Efficacy may be monitored by monitoring vision acuity, redness of the eye, sensitivity to light, and/or eye pain. For example, efficacy can be monitored by assessing change in vision acuity, redness of the eye, sensitivity to light, and/or eye pain from baseline.

[1215] Combinations of delivery of the anti-IL6, anti-IL6R, anti-TNFα, or anti-C5 HuPTM mAb or antigen-binding fragment thereof, to the retina accompanied by delivery of other available treatments are encompassed by the methods provided herein. The additional treatments may be administered before, concurrently, or subsequent to the gene therapy treatment. Available treatments for a subject with non-infectious uveitis that could be combined with the gene therapy provided herein include but are not limited to, azathioprine, methotrexate, mycophenolate mofetil, cyclosporine, cyclophosphamide, corticosteroids (local and/or systemic (oral and/or inhaled)), and others and administration with anti-TNFα, anti-IL6, anti-IL6R, or anti-C5 agents, including but not limited to adalimumab, infliximab, or golimumab.

[1216] Constructs for Delivery to Retinal Cell Types

[1217] Sections 5.3.9, 5.3.11, and 5.3.15 describe recombinant vectors that contain a transgene encoding a HuPTM mAb or HuPTM Fab (or other antigen binding fragment of the HuPTM mAb) that binds to C5, TNFα, IL6R, and IL6. Such recombinant vectors used for delivering the transgene can have a tropism for one or more human retina cell types. Such vectors can include non-replicating recombinant adeno-associated virus vectors (“rAAV”), e.g., those bearing an AAV8 capsid. Alternatively, an AAV vector bearing an AAV2.7m8 capsid can be used. However, other viral vectors may be used, including but not limited to lentiviral vectors, vaccinia viral vectors, or non-viral expression vectors referred to as “naked DNA” constructs.

[1218] In preferred embodiments, provided are constructs for gene therapy administration to a human subject, comprising an AAV vector, which comprises a viral capsid that is at least 95% identical to the amino acid sequence of an AAV8 capsid (SEQ ID NO: 143) or an AAV2.7m8 capsid (SEQ ID NO: 142); and a viral or artificial genome comprising an expression cassette flanked by AAV inverted terminal repeats (ITRs) wherein the expression cassette comprises a transgene encoding the heavy and light chains of the therapeutic antibody, operably linked to one or more regulatory sequences that control expression of the transgene in human cells (e.g., retina cell or liver cell types) that express and deliver the therapeutic antibody in a therapeutically appropriate manner as disclosed herein. In certain embodiments, the encoded AAV8 or AAV2.7m8 capsid has the sequence of SEQ ID NO: 143 or 142 with 1, 2, 3, 4, 5, 6, 7, 8, 9, 10, 11, 12, 13, 14, 15, 16, 17, 18, 19, 20, 21, 22, 23, 24, 25, 26, 27, 28, 29 or 30 amino acid substitutions, particularly substitutions with amino acid residues found in the corresponding position in other AAV capsids, for example, in the SUBS row of FIG. 21 which provides a comparison of the amino acid sequences of the capsid sequences of various AAVs, highlighting amino acids appropriate for substitution at different positions within the capsid sequence.

[1219] In some embodiments, the HuPTM mAb or antigen binding fragment thereof, including the HuPTM Fab transgene should be controlled by appropriate expression control elements for expression of the HuPTM Fab or HuPTM Mab in human retina or liver cell types, for example, CB7 promoter (a chicken β-actin promoter and CMV enhancer/CAG, SEQ ID NO: 411), or tissue-specific promoters, and can include other expression control elements that enhance expression of the transgene driven by the vector. Promoter sequences and sequences of other regulatory elements, such as introns, are provided in Table 1.

[1220] Gene therapy constructs for antibodies or Fabs are designed such that both the heavy and light chains are expressed. More specifically, the heavy and light chains should be expressed at about equal amounts, in other words, the heavy and light chains are expressed at approximately a 1:1 ratio of heavy chains to light chains. The coding sequences for the heavy and light chains can be engineered in a single construct in which the heavy and light chains are separated by a cleavable linker or IRES so that separate heavy and light chain polypeptides are expressed. The leader sequence for each of the heavy and light chains is, e.g., MYRMQLLLLIALSLALVTNS (SEQ ID NO: 146). Section 5.1.5, supra, provides specific IRES, 2A, and other linker sequences that can be used with the methods and compositions provided herein. In specific embodiments, the linker is a Furin-2A linker, for example a Furin-F2A linker RKRR(GSG)APVKQTLNFDLLKLAGDVESNPGP (SEQ ID NO: 231) or a Furin-T2A linker RKRR(GSG)EGRGSLLTCGDVEENPGP (SEQ ID NO: 429). In specific embodiments, the transgene is a nucleotide sequence that encodes the following: Signal sequence-heavy chain Fab portion-Furin-(F/T)2A linker-signal sequence-light chain Fab portion. See FIGS. 10B and 10D for sequences for tesidolumab and ravulizumab Fab expression, respectively; FIGS. 12A to 12C for a sequence for adalimumab, infliximab, and golimumab Fab expression, respectively; and FIGS. 16A to 16I for sequences for satralizumab, sarilumab, siltuximab, clazakizumab, sirukumab, olokizumab, gerilimzumab, and tocilizumab, inebilizumab Fab expression, respectively. In an alternative embodiment, the construct also comprises the nucleotide sequence encoding the Fc domain for the therapeutic antibody (see Table 7 or FIG. 23) for expression of the full length mAb. Nucleotide sequences for adalimumab mAb and Fab single chain construct transgenes are described in Table 17. Nucleic acid sequences coding for the component sequences of the heavy and light chains of adalimumab, either the full length (SEQ ID NOS: 444 and 448) or Fab fragments (components encoded by SEQ ID NOS: 445 and 446 (heavy chain) and 498-450 (light chain) are also provided.

[1221] In a specific embodiment, the constructs described herein comprise the following components: (1) AAV2 inverted terminal repeats that flank the expression cassette; (2) Control elements, which include a) the CB7 promoter (SEQ ID NO: 411), comprising the CMV enhancer/chicken (β-actin promoter, b) a chicken (β-actin intron and c) a rabbit β-globin poly A signal; and (3) nucleic acid sequences coding for the heavy and light chains of the C5-binding, TNFα-binding, IL6R-binding, and IL6-binding Fab, separated by a self-cleaving furin (F)/(F/T)2A linker (SEQ ID NOS: 231 or 429, respectively), ensuring expression of equal amounts of the heavy and the light chain polypeptides. An exemplary construct is provided in FIG. 1.

[1222] In a preferred embodiment, the construct described herein comprise the following components: (1) AAV2 inverted terminal repeats that flank the expression cassette; (2) Control elements, which include a) the CB7 promoter (SEQ ID NO: 411), comprising the CMV enhancer/chicken β-actin promoter, b) a chicken β-actin intron and c) a rabbit β-globin poly A signal; and (3) nucleic acid sequences coding for the component sequences of the heavy and light chains of adalimumab, either the full length (SEQ ID NOS: 444 and 448) or Fab fragments (components encoded by SEQ ID NOS: 445 and 446 (heavy chain) and 498-450 (light chain), separated by a self-cleaving furin (F)/T2A linker (SEQ ID NOS: 429), ensuring expression of equal amounts of the heavy and the light chain polypeptides.

[1223] In specific embodiments, provided are AAV vectors comprising a viral capsid that is at least 95% identical to the amino acid sequence of an AAV8 capsid (SEQ ID NO: 143) or of an AAV2.7m8 (SEQ ID NO: 142); and an artificial genome comprising an expression cassette flanked by AAV inverted terminal repeats, wherein the expression cassette comprises a transgene encoding an anti-C5 anti-TNFα, anti-IL6R, and anti-IL6 mAb, or an antigen-binding fragment thereof, operably linked to one or more regulatory sequences that control expression of the transgene in one or more retina cell types (such as human photoreceptor cells (cone cells, rod cells); horizontal cells; bipolar cells; amarcrine cells; retina ganglion cells (midget cell, parasol cell, bistratified cell, giant retina ganglion cell, photosensitive ganglion cell, and muller glia); and retinal pigment epithelial cells).

[1224] In a preferred embodiment, provided is an AAV comprising a viral capsid that is at least 95% identical to the amino acid sequence of an AAV8 capsid (SEQ ID NO: 143); and an artificial genome comprising an expression cassette flanked by AAV inverted terminal repeats (ITRs), wherein the expression cassette comprises a transgene encoding an adalimumab mAb (SEQ ID NO: 451), or an antigen-binding fragment thereof (SEQ ID NO: 453), operably linked to one or more regulatory sequences that control expression of the transgene in one or more retina cell types (such as human photoreceptor cells (cone cells, rod cells); horizontal cells; bipolar cells; amarcrine cells; retina ganglion cells (midget cell, parasol cell, bistratified cell, giant retina ganglion cell, photosensitive ganglion cell, and muller glia); and retinal pigment epithelial cells).

[1225] Administration for Delivering to Retinal Type Cells

[1226] Therapeutically effective doses of the recombinant vector described above should be administered in any manner such that the recombinant vector enters the retina, e.g., by introducing the recombinant vector directly into the eye. In specific, embodiments, the vector is administered subretinally (a surgical procedure performed by trained retinal surgeons that involves a partial vitrectomy with the subject under local anesthesia, and injection of the gene therapy into the retina, or intravitreally, or suprachoroidally such as by microinjection or microcannulation. Subretinal, intravitreal or suprachoroidal administration should result in expression of the soluble transgene product in one or more of the following retinal cell types: human photoreceptor cells (cone cells, rod cells); horizontal cells; bipolar cells; amarcrine cells; retina ganglion cells (midget cell, parasol cell, bistratified cell, giant retina ganglion cell, photosensitive ganglion cell, and muller glia); and retinal pigment epithelial cells. The expression of the encoded anti-C5, anti-TNFα, anti-IL6R, and anti-IL6 antibody results in delivery and maintenance of the transgene product in the retina. Pharmaceutical compositions suitable for administration comprise a suspension of the recombinant vector comprising the transgene encoding the anti-C5, anti-TNFα, anti-IL6R, and anti-IL6 antibody, or antigen-binding fragment thereof, in a formulation buffer comprising a physiologically compatible aqueous buffer. The formulation buffer can comprise one or more of a polysaccharide, a surfactant, polymer, or oil.

[1227] Full Length Expression of mAb in Retinal Cell Types

[1228] In a specific embodiment for expressing an intact or substantially intact mAb in retinal cell types, the constructs described herein comprise the following components: (1) AAV2 inverted terminal repeats that flank the expression cassette; (2) Control elements, which include a) the CB7 promoter, comprising the CMV enhancer/chicken (β-actin promoter, b) a chicken β-actin intron and c) a rabbit β-globin poly A signal; and (3) nucleic acid sequences coding for the heavy chain Fab of an anti-C5 (e.g., tesidolumab, ravulizumab), anti-TNFα (e.g., adalimumab, infliximab, and golimumab), anti-IL6R (e.g., satralizumab, sarilumab, and tocilizumab), anti-IL6 (e.g. siltuximab, clazakizumab, sirukumab, olokizumab, and gerilimzumab), an Fc polypeptide associated with the therapeutic antibody (Table 6 and X) or of the same IgG isotype as the native form of the therapeutic antibody, such as an IgG isotype amino acid sequence from FIG. 23, and a light chain of an anti-C5 (e.g., tesidolumab and ravulizumab), anti-TNFα (e.g., adalimumab, infliximab, and golimumab), anti-IL6R (e.g., satralizumab, sarilumab, and tocilizumab), and anti-IL6 (e.g. siltuximab, clazakizumab, sirukumab, olokizumab, and gerilimzumab), wherein the heavy chain (Fab and Fc polypeptide) and light chain are separated by a self-cleaving furin (F)/(T/F)2A or flexible linker, ensuring expression of equal amounts of the heavy and the light chain polypeptides. An exemplary construct is provided in FIG. 1.

[1229] In specific embodiments, provided are AAV vectors comprising a viral capsid that is at least 95% identical to the amino acid sequence of an AAV8 capsid (SEQ ID NO: 143) or of an AAV2.7m8 (SEQ ID NO: 142); and an artificial genome comprising an expression cassette flanked by AAV inverted terminal repeats (ITRs), wherein the expression cassette comprises a transgene encoding an intact or substantially intact anti-C5, anti-TNFα, anti-IL6R, or anti-IL6 mAb, operably linked to one or more regulatory sequences that control expression of the transgene in one or more retina cell types (such as human photoreceptor cells (cone cells, rod cells); horizontal cells; bipolar cells; amarcrine cells; retina ganglion cells (midget cell, parasol cell, bistratified cell, giant retina ganglion cell, photosensitive ganglion cell, and muller glia); and retinal pigment epithelial cells).

### 5.3.21. Anti-C5 HuPTM Constructs and Formulations for Myasthenia Gravis

[1230] Compositions and methods are described for the delivery of HuPTM mAbs and antigen-binding fragments thereof, such as HuPTM Fabs, that bind to complement component 5 (anti-C5) derived from anti-C5 antibody, such as ravulizumab (FIG. 10D), and indicated for treating myasthenia gravis. In certain embodiments, the HuPTM mAb has the amino acid sequence of romosozumab or an antigen binding fragment thereof. The amino acid sequence of Fab fragment of this antibody is provided in FIG. 10D. Delivery may be accomplished via gene therapy—e.g., by administering a viral vector or other DNA expression construct encoding an C5-binding HuPTM mAb (or an antigen binding fragment and/or a hyperglycosylated derivative or other derivative, thereof) to patients (human subjects) diagnosed with myasthenia gravis to create a permanent depot that continuously supplies the human PTM, e.g., human-glycosylated, transgene product.

[1231] Transgenes

[1232] Provided are recombinant vectors containing a transgene encoding a HuPTM mAb or HuPTM Fab (or other antigen binding fragment of the HuPTM mAb) that binds to C5 that can be administered to deliver the HuPTM mAb or antigen binding fragment in a patient. The transgene is a nucleic acid comprising the nucleotide sequences encoding an antigen binding fragment of an antibody that binds to C5, such as ravulizumab or variants thereof as detailed herein. The transgene may also encode an anti-C5 antigen binding fragment that contains additional glycosylation sites (e.g., see Courtois et al.).

[1233] In certain embodiments, the anti-C5 antigen-binding fragment transgene comprises the nucleotide sequences encoding the heavy and light chains of the Fab portion of ravulizumab (having amino acid sequences of SEQ ID NOs. 362 and 363, respectively, see Table 5 and FIG. 10D). The nucleotide sequences may be codon optimized for expression in human cells. Nucleotide sequences may, for example, comprise the nucleotide sequences of SEQ ID NO: 378 (encoding the ravulizumab heavy chain Fab portion) and SEQ ID NO: 379 (encoding the ravulizumab light chain Fab portion) as set forth in Table 6. The heavy and light chain sequences both have a signal or leader sequence at the N-terminus appropriate for expression and secretion in human cells, in particular, human liver cells (e.g., hepatocytes) or muscle cells. The signal sequence may have the amino acid sequence of MYRMQLLLLIALSLALVTNS (SEQ ID NO: 146). Alternatively, the signal sequence may have an amino acid sequence selected from any one of the signal sequences set forth in Table 3 or 4 that correspond to the proteins secreted by myocytes or hepatocytes, respectively.

[1234] In addition to the heavy and light chain variable domain and C_{H}1 and C_{L} domain sequences, the transgenes may comprise, at the C-terminus of the heavy chain C_{H}1 domain sequence, all or a portion of the hinge region. In specific embodiments, the anti-C5-antigen binding domain has a heavy chain Fab domain of SEQ ID NO: 362 with additional hinge region sequence starting after the C-terminal valine (V), contains all or a portion of the amino acid sequence contains all or a portion of the amino acid sequence ERKCCVECPPCPAPPVAG (SEQ ID NO: 220) or ERKCCVECPPCPA (SEQ ID NO: 221) as set forth in FIG. 10D. These hinge regions may be encoded by nucleotide sequences at the 3′ end of SEQ ID NO: 378 by the hinge region encoding sequences set forth in Table 6 (SEQ ID NO: 378). In another embodiment, the transgenes comprise the amino acid sequences encoding the full length (or substantially full length) heavy and light chains of the antibody, comprising the Fc domain at the C terminus of the heavy chain, e.g having an amino acid sequence of SEQ ID NO: 393 (Table 7) or an IgG2 Fc domain, such as SEQ ID No. 284 or as depicted in FIG. 23, or a mutant or variant thereof. The Fc domain may be engineered for altered binding to one or more Fc receptors and/or effector function as disclosed in Section 5.1.9, infra.

[1235] In certain embodiments, the anti-C5 antigen-binding fragment transgene encodes an C5 antigen-binding fragment comprising a light chain comprising an amino acid sequence that is at least 85%, 86%, 87%, 88%, 89%, 90%, 91%, 92%, 93%, 94%, 95%, 96%, 97%, 98% or 99% identical to the sequence set forth in SEQ ID NO: 363. In certain embodiments, the anti-C5 antigen-binding fragment transgene encodes an C5 antigen-binding fragment comprising a heavy chain comprising an amino acid sequence that is at least 85%, 86%, 87%, 88%, 89%, 90%, 91%, 92%, 93%, 94%, 95%, 96%, 97%, 98% or 99% identical to the sequence set forth in SEQ ID NO: 362. In certain embodiments, the anti-C5 antigen-binding fragment transgene encodes an antigen-binding fragment comprising a light chain comprising an amino acid sequence that is at least 85%, 86%, 87%, 88%, 89%, 90%, 91%, 92%, 93%, 94%, 95%, 96%, 97%, 98% or 99% identical to the sequence set forth in SEQ ID NO: 363 and a heavy chain comprising an amino acid sequence that is at least 85%, 86%, 87%, 88%, 89%, 90%, 91%, 92%, 93%, 94%, 95%, 96%, 97%, 98% or 99% identical to the sequence set forth in SEQ ID NO: 362. In specific embodiments, the C5 antigen binding fragment comprises a heavy chain comprising an amino acid sequence of SEQ ID NO: 362 with 1, 2, 3, 4, 5, 6, 7, 8, 9, 10, 11, 12, 13, 14, 15 or more amino acid substitutions, insertions or deletions, and the substitutions, insertions or deletions are made, e.g., in the framework regions (e.g., those regions outside of the CDRs, which CDRs are underlined in FIG. 10D) or are substitutions with an amino acid present at that position in the heavy chain of one or more of the other therapeutic antibodies, for example, as identified by the alignment in FIG. 20A. In specific embodiments, the C5 antigen binding fragment comprises a light chain comprising an amino acid sequence of SEQ ID NO: 363 with 1, 2, 3, 4, 5, 6, 7, 8, 9, 10, 11, 12, 13, 14, 15 or more amino acid substitutions, insertions or deletions, and the substitutions, insertions or deletions are made, e.g., in the framework regions (e.g., those regions outside of the CDRs, which CDRs are underlined in FIG. 10D) or are substitutions with an amino acid present at that position in the light chain of one or more of the other therapeutic antibodies, for example, as identified by the alignment in FIG. 20B.

[1236] In certain embodiments, the anti-C5 antigen-binding fragment transgene encodes a hyperglycosylated ravulizumab Fab, comprising a heavy chain and a light chain of SEQ ID NOs: 363 and 362, respectively, with one or more of the following mutations L117N (heavy chain), Q160N or Q160S (light chain), and/or E195N (light chain) (see FIG. 20A (heavy chain) and B (light chain)).

[1237] In certain embodiments, the anti-C5 antigen-binding fragment transgene encodes an antigen-binding fragment and comprises the nucleotide sequences encoding the six romosozumab CDRs which are underlined in the heavy and light chain variable domain sequences of FIG. 10D which are spaced between framework regions, generally human framework regions, and associated with constant domains depending upon the form of the antigen-binding molecule, as is known in the art to form the heavy and/or light chain variable domain of an anti-C5 antibody or antigen-binding fragment thereof.

[1238] Gene Therapy Methods

[1239] Provided are methods of treating human subjects for myasthenia gravis by administration of a viral vector containing a transgene encoding an anti-C5 antibody, or antigen binding fragment thereof. The antibody may be ravulizumab, and is e.g. a full length or substantially full length antibody or Fab fragment thereof, or other antigen-binding fragment thereof. In embodiments, the patient has been diagnosed with and/or has symptoms associated with myasthenia gravis. Recombinant vectors used for delivering the transgene are described in Section 5.4.2. Such vectors should have a tropism for human liver or muscle cells and can include non-replicating rAAV, particularly those bearing an AAV8 or AAV9 capsid. The recombinant vector, such as shown in FIG. 10D, can be administered in any manner such that the recombinant vector enters the liver or muscle tissue, e.g., by introducing the recombinant vector into the bloodstream. See Section 5.5.2 for details regarding the methods of treatment.

[1240] Subjects to whom such gene therapy is administered can be those responsive to anti-C5 therapy. In certain embodiments, the methods encompass treating patients who have been diagnosed with myasthenia gravis, or have one or more symptoms associated therewith, and identified as responsive to treatment with an anti-C5 antibody or considered a good candidate for therapy with an anti-C5 antibody. In specific embodiments, the patients have previously been treated with ravulizumab, and have been found to be responsive to ravulizumab. To determine responsiveness, the anti-C5 antibody or antigen-binding fragment transgene product (e.g., produced in cell culture, bioreactors, etc.) may be administered directly to the subject.

[1241] Human Post Translationally Modified Antibodies

[1242] The production of the anti-C5 HuPTM mAb or HuPTM Fab, should result in a “biobetter” molecule for the treatment of myasthenia gravis accomplished via gene therapy—e.g., by administering a viral vector or other DNA expression construct encoding the anti-C5 HuPTM Fab, intravenously to human subjects (patients) diagnosed with or having one or more symptoms of osteoporosis or bone loss, to create a permanent depot in the liver or muscle tissue that continuously supplies the fully-human post-translationally modified, e.g., human-glycosylated, sulfated transgene product produced by transduced liver or muscle cells.

[1243] The cDNA construct for the anti-C5 HuPTMmAb or anti-C5 HuPTM Fab should include a signal peptide that ensures proper co- and post-translational processing (glycosylation and protein sulfation) by the transduced liver or muscle cells. For example, the signal sequence may be MYRMQLLLLIALSLALVTNS (SEQ ID NO: 146). Alternatively, the signal sequence may have an amino acid sequence selected from any one of the signal sequences set forth in Table 3 or 4 that correspond to the proteins secreted by myocytes or hepatocytes, respectively.

[1244] As an alternative, or an additional treatment to gene therapy, the anti-C5 HuPTM mAb or HuPTM Fab can be produced in human cell lines by recombinant DNA technology, and administered to patients diagnosed with osteoporosis or bone loss, or for whom therapy for osteoporosis or bone loss is considered appropriate.

[1245] In specific embodiments, the anti-C5 HuPTM mAb or antigen-binding fragment thereof has heavy and light chains with the amino acid sequences of the heavy and light chain Fab portions of ravulizumab as set forth in FIG. 10D (with glutamine (Q) glycosylation sites; asparaginal (N) glycosylation sites, non-consensus asparaginal (N) glycosylation sites; and tyrosine-O-sulfation sites (Y) are as indicated in the legend) has a glycosylation, particularly a 2,6-sialylation, at one or more of the amino acid positions N63, N106, Q114, N164, N197, and/or N206 of the heavy chain (SEQ ID NO: 362) or N28, Q100, N158, and/or N210 of the light chain (SEQ ID NO: 363). Alternatively or in addition to, the HuPTM mAb or antigen binding-fragment thereof with the heavy and light chain variable domain sequences of ravulizumab has a sulfation group at Y94 and/or Y95 of the heavy chain (SEQ ID NO: 362) and/or Y86 and/or Y86 of the light chain (SEQ ID NO: 363). In other embodiments, the anti-C5 HuPTM mAb or antigen-binding fragment thereof does not contain detectable NeuGc moieties and/or does not contain detectable alpha-Gal moieties. In certain embodiments, the HuPTM mAb is a full length or substantially full length mAb with an Fc region.

[1246] In certain embodiments, the HuPTM mAb or Fab is therapeutically effective and is at least 0.5%, 1% or 2% glycosylated and/or sulfated and may be at least 5%, 10% or even 50% or 100% glycosylated and/or sulfated. The goal of gene therapy treatment provided herein is to slow or arrest the progression of myasthenia gravis. Efficacy may be monitored by evaluating changes in endurance or fatigability from baseline, e.g. by using the Quantitative Myasthenia Gravis Score (QMGS), Manual Muscle Test (MMT), and/or Myasthenia Muscle Score (see Barnett C et al. Neurol Clin. 2018 May; 36(2): 339-353). For example, the QMSC score assesses changes in ptosis, diplopia, orbicularis oculi weakness, swallowing a cup of water, speech, percent predicted forced vital capacity, grip strength (2 items), arm endurance (2 items), leg endurance (2 items), and neck flexion endurance.

[1247] Combinations of delivery of the anti-C5 HuPTM mAb or antigen-binding fragment thereof, to the liver or muscles accompanied by delivery of other available treatments are encompassed by the methods provided herein. The additional treatments may be administered before, concurrently, or subsequent to the gene therapy treatment. Available treatments for myasthenia gravis that could be combined with the gene therapy provided herein include but are not limited to pyridostigmine, corticosteroids, or immunosuppressants, and administration with anti-C5 agents, including but not limited to ravulizumab.

TABLE 5
Table of Fab Fragment Amino Acid Sequences

| | Chain/ | |
|---|---|---|
| | SEQ ID | |
| mAb | NO. | Sequence |
| Solanezumab | Heavy/ | EVQLVESGGG LVQPGGSLRL SCAASGFTFS RYSMSWVRQA |
| | SEQ ID | PGKGLELVAQ INSVGNSTYY PDTVKGRFTI SRDNAKNTLY |
| | NO: 1 | LQMNSLRAED TAVYYCASGD YWGQGTLVTV SSASTKGPSV |
| | | FPLAPSSKST SGGTAALGCL VKDYFPEPVT VSWNSGALTS |
| | | GVHTFPAVLQ SSGLYSLSSV VTVPSSSLGT QTYICNVNHK |
| | | PSNTKVDKKV EPKSCD +/- KTHT(or KTHL) +/- CPPCPA +/- |
| | | PELLGGPSVFL |
| Solanezumab | Light/ | DVVMTQSPLS LPVTLGQPAS ISCRSSQSLI YSDGNAYLHW |
| | SEQ ID | FLQKPGQSPR LLIYKVSNRF SGVPDRFSGS GSGTDFTLKI |
| | NO: 2 | SRVEAEDVGV YYCSQSTHVP WTFGQGTKVE IKRTVAAPSV |
| | | FIFPPSDEQL KSGTASVVCL LNNFYPREAK VQWKVDNALQ |
| | | SGNSQESVTE QDSKDSTYSL SSTLTLSKAD YEKHKVYACE |
| | | VTHQGLSSPV TKSFNRGEC |
| GSK933776 | Heavy/ | EVQLVESGGG LVQPGGSLRL SCA A/V SGFTFS DNGMAWVRQA |
| | SEQ ID | PGKGLEWVSF ISNLAYSIDY ADTVTGRFTI SRDNAKNSLY |
| | NO: 3 | LQMNSLRAED TAVYYCVSGT WFAYWGQGTL VTVSSASTKG |
| | | PSVFPLAPSS KSTSGGTAAL GCLVKDYFPE PVTVSWNSGA |
| | | LTSGVHTFPA VLQSSGLYSL SSVVTVPSSS LGTQTYICNV |
| | | NHKPSNTKVD KKVEPKSCD +/- KTHT (or KTHL)+/- |
| | | CPPCPA +/- PELAGAPSVFL |
| GSK933776 | Light/ | DIVMTQSPLS LPVTPGEPAS ISCRVSQSLL HSNGYTYLHW |
| | SEQ ID | YLQKPGQSPQ LLIYKVSNRF SGVPDRFSGS GSGTDFTLKI |
| | NO: 4 | SRVEAEDVGV YYCSQTRHVP YTFGGGTKVE IKRTVAAPSV |
| | | FIFPPSDEQL KSGTASVVCL LNNFYPREAK VQWKVDNALQ |
| | | SGNSQESVTE QDSKDSTYSL SSTLTLSKAD YEKHKVYACE |
| | | VTHQGLSSPV TKSFNRGEC |
| AL-001 | Heavy/ | QVQLVQSGAE VKKPGASVKV SCKASGYTFT KYYMSWVRQA |
| | SEQ ID | PGQGLEWMGI INPIGGSTSY AQKFQGRVTM TRDTSTSTVY |
| | NO: 5 | MELSSLRSED TAVYYCARDP SGIALAGPAS RGYQGMDVWG |
| | | QGTTVTVSSA STKGPSVFPL APSSKSTSGG TAALGCLVKD |
| | | YFPEPVTVSW NSGALTSGVH TFPAVLQSSG LYSLSSVVTV |
| | | PSSSLGTQTY ICNVNHKPSN TKVDKRVEPK SCD +/- KTHT |
| | | (or KTHL) +/-CPPCPA +/- PELLGGPSVFL |
| AL-001 | Light/ | EIVMTQSPAT LSVSPGERAT LSCRASQSVS SNLAWYQQKP |
| | SEQ ID | GQAPRLLIYG ASTRATGIPA RFSGSGSGTE FTLTISSLQS |
| | NO: 6 | EDFAVYYCQQ ARLGPWTFGG GTKVEIKRTV AAPSVFIFPP |
| | | SDEQLKSGTA SVVCLLNNFY PREAKVQWKV DNALQSGNSQ |
| | | ESVTEQDSKD STYSLSSTLT LSKADYEKHK VYACEVTHQG |
| | | LSSPVTKSFN RGEC |
| ABBV-8E12 | Heavy/ | EVKVVESGGG LVQPGGSMKL SCVVSGFTFS NYWVNWVRQA |
| | SEQ ID | PGKGLEWVAQ IRLKSDNYAT HYEESVKGRF TISRDDSKSS |
| | NO: 7 | VYLQMNNLRA EDSGIYYCTN WEDYWGQGTT VTVSSASTKG |
| | | PSVFPLAPCS RSTSESTAAL GCLVKDYFPE PVTVSWNSGA |
| | | LTSGVHTFPA VLQSSGLYSL SSVVTVPSSS LGTKTYTCNV |
| | | DHKPSNTKVD KRVESKY +/- GPPCPPCPA (or GPPCPSCPA)+/- |
| | | PEFLGGPSVFL |
| ABBV-8E12 | Light/ | DIVLTQSPDS LAVSLGERAT ISCRASQSVS TSRYSYIHWY |
| | SEQ ID | QQKPGQFPKL LIKYASNLES GVPSRFSGSG SGTDFTLNIH |
| | NO: 8 | PLEPEDFATY YCHHSWEIPL TFGQGTKLEI KRTVAAPSVF |
| | | IFPPSDEQLK SGTASVVCLL NNFYPREAKV QWKVDNALQS |
| | | GNSQESVTEQ DSKDSTYSLS STLTLSKADY EKHKVYACEV |
| | | THQGLSSPVT KSFNRGEC |
| UCB-0107 | Heavy/ | EVQLQESGPG LVKPSETLSL TCTVSGFSLT SNDIAWIRQP |
| | SEQ ID | PGKGLEWMGT IWTDGSTNYN A/T AVQSRVTIS VDTSKNQFSL |
| | NO: 9 | KLSSVTAADT AVYYCARHRL YYGAFDYWGQ GTMVTVSSAS |
| | | TKGPSVFPLA PCSRSTSEST AALGCLVKDY FPEPVTVSWN |
| | | SGALTSGVHT FPAVLQSSGL YSLSSVVTVP SSSLGTKTYT |
| | | CNVDHKPSNT KVDKRVESKY +/- GPPCPPCPA (or |
| | | GPPCPSCPA)+/- PEFLGGPSVFL |
| UCB-0107 | Light/ | DIVMTQTPLS LSVTPGQPAS ISCRSSQSLE YSDGYTYLEW |
| | SEQ ID | YLQKPGQSPQ LLIYEVSNRF SGVPDRFSGS GSGTDFTLKI |
| | NO: 10 | SRVEAEDVGV YYCFQATHNP YTFGQGTKLE IKRTVAAPSV |
| | | FIFPPSDEQL KSGTASVVCL LNNFYPREAK VQWKVDNALQ |
| | | SGNSQESVTE QDSKDSTYSL SSTLTLSKAD YEKHKVYACE |
| | | VTHQGLSSPV TKSFNRGEC |
| NI-105 | Heavy/ | QVQLVESGGG VVQPGRSLRV SCAASGFTFS SYDMHWVRQA |
| | SEQ ID | PGKGLEWVAV IWFDGSNEFY ADSVKGRFTI SRDNSKNTLF |
| | NO: 11 | QMNSLRAEDT AVYYCARDLG ASVTTSNAEN FHHWGQGTLV |
| | | TVSSASTKGP SVFPLAPSSK STSGGTAALG CLVKDYFPEP |
| | | VTVSWNSGAL TSGVHTFPAV LQSSGLYSLS SVVTVPSSSL |
| | | GTQTYICNVN HKPSNTKVDK KVEPKSCD +/- KTHT (or KTHL)+/- |
| | | CPPCPA +/- PELAGAPSVFL |
| NI-105 | Light/ | SYELTQPPSV SVSPGQTARI TCSGDALPKR YVYWYQQKSG |
| | SEQ ID | QAPVLVIYED SKRPSGIPET FSGSSSGTMA TLTISGAQVE |
| | NO: 12 | DEADYYCYST DSNGHHWVFG GGTKLTVLGQ PKAAPSVTLF |
| | | PPSSEELQAN KATLVCLISD FYPGAVTVAW KADSSPVKAG |
| | | VETTTPSKQS NNKYAASSYL SLTPEQWKSH RSYSCQVTHE |
| | | GSTVEKTVAP TCS |
| VX15/2503 | Heavy/ | QVQLVQSGAE VKKPGSSVKV SCKASGYSFS DYYMHWVRQA |
| | SEQ ID | PGQGLEWMGQ INPTTGGASY NQKFKGKATI TVDKSTSTAY |
| | NO: 13 | MELSSLRSED TAVYYCARYY YGRHFDVWGQ GTTVTVSSAS |
| | | TKGPSVFPLA PCSRSTSEST AALGCLVKDY FPEPVTVSWN |
| | | SGALTSGVHT FPAVTVSSVL QSSGLYSLSS VVTVPSSSLG |
| | | TKTYTCNVDH KPSNTKVDKR VESKY +/- GPPCPPCPA(or |
| | | GPPCPSCPA) +/- PEFLGGPSVFL |
| VX15/2503 | Light/ | DIVMTQSPDS LAVSLGERAT INCKASQSVD YDGDSYMNWY |
| | SEQ ID | QQKPGQPPKL LIYAASNLES GVPDRFSGSG SGTDFTLTIS |
| | NO: 14 | SLQAEDVAVY YCQQSNEDPY TFGQGTKLEI KFIFPPSDEQ |
| | | LKSGTASVVC LLNNFYPREA KVQWKVDNAL QSGNSQESVT |
| | | EQDSKDSTYS LSSTLTLSKA DYEKHKVYAC EVTHQGLSSP |
| | | VTKSFNRGEC |
| Prasinezumab | Heavy/ | EVQLVESGGG LVQPGGSLRL SCAASGFTFS NYGMSWVRQA |
| | SEQ ID | PGKGLEWVAS ISSGGGSTYY PDNVKGRFTI SRDDAKNSLY |
| | NO: 15 | LQMNSLRAED TAVYYCARGG AGIDYWGQGT LVTVSSASTK |
| | | GPSVFPLAPS SKSTSGGTAA LGCLVKDYFP EPVTVSWNSG |
| | | ALTSGVHTFP AVLQSSGLYS LSSVVTVPSS SLGTQTYICN |
| | | VNHKPSNTKV DKRVEPKSCD +/- KTHT(or KTHL) +/- |
| | | CPPCPA +/- PELLGGPSVFL |
| Prasinezumab | Light/ | DIQMTQSPSS LSASVGDRVT ITCKSIQTLL YSSNQKNYLA |
| | SEQ ID | VFQQKPGKAP KLLIYWASIR KSGVPSRFSG SGSGTDFTLT |
| | NO: 16 | ISSLQPEDLA TYYCQQYYSY PLTFGGGTKL EIKRTVAAPS |
| | | VFIFPPSDEQ LKSGTASVVC LLNNFYPREA KVQWKVDNAL |
| | | QSGNSQESVT EQDSKDSTYS LSSTLTLSKA DYEKHKVYAC |
| | | EVTHQGLSSP VTKSFNRGEC |
| NI-202 | Heavy/ | EVQLVESGAE VKKPGASVKV SCKASGYTFT NYAMHWVRQA |
| | SEQ ID | PGQRLEWMGW INAGNGKRKY SQKFQDRVTI NRDTSASTIY |
| | NO: 17 | MELSSLGSED TAVYYCAREE DHAGSGSYLS MDVWGQGTLV |
| | | TVSSASTKGP SVFPLAPSSK STSGGTAALG CLVKDYFPEP |
| | | VTVSWNSGAL TSGVHTFPAV LQSSGLYSLS SVVTVPSSSL |
| | | GTQTYICNVN HKPSNTKVDK RVEPKSCD +/- KTHT(or KTHL) +/- |
| | | CPPCPA +/- PELLGGPSVFL |
| NI-202 | Light/ | DIQMTQSPSS LSASVGDRVT ITCKSIQTLL YSSNQKNYLA |
| | SEQ ID | WFQQKPGKAP KLLIYWASIR KSGVPSRFSG SGSGTDFTLT |
| | NO: 18 | ISSLQPEDLA TYYCQQYYSY PLTFGGGTKL EIKRTVAAPS |
| | | VFIFPPSDEQ LKSGTASVVC LLNNFYPREA KVQWKVDNAL |
| | | QSGNSQESVT EQDSKDSTYS LSSTLTLSKA DYEKHKVYAC |
| | | EVTHQGLSSP VTKSFNRGEC |
| MEDI- | Heavy/ | EVQLLESGGG LVQPGGSLRL SCAASGFTFS SYAMSWVRQA |
| 1341/TAK341 | SEQ ID | PGKGLEWVSS ISHLGGSTYY ADSVKGRFTI SRDNSKNTLY |
| | NO: 19 | LQMNSLRAED TAVYYCAGGA NHGKYYYGMD KWGQGTTVTV |
| | | SSASTKGPSV FPLAPSSKST SGGTAALGCL VKDYFPEPVT |
| | | VSWNSGALTS GVHTFPAVLQ SSGLYSLSSV VTVPSSSLGT |
| | | QTYICNVNHK PSNTKVDKRV EPKSCD +/- KTHT (or KTHL) +/- |
| | | CPPCPA +/- PEFEGGPSVFL |
| MEDI- | Light/ | QAVLTQPASL SASPGASASL TCTLRSGAPL PKYRIYWYQQ |
| 1341/TAK341 | SEQ ID | KPGSPPQYLL RYKSDADKHQ GSGVPSRFSG SKDASANAGI |
| | NO: 20 | LLISGLQSED EADYYCMVWD HGVWYFGGGT KLTVLGQPKA |
| | | APSVTLFPPS SEELQANKAT LVCLISDFYP GAVTVAWKAD |
| | | SSPVKAGVET TTPSKQSNNK YAASSYLSLT PEQWKSHRSY |
| | | SCQVTHEGST VEKTVAPTEC S |
| NI-204.10D12 | Heavy/ | EVQLVESGGD LVRPGGSLRL SCVASGFTFS NYWMHWVRQA |
| | SEQ ID | PGQRPVWVSR TNTDGRNTAY ADYAKGRFTI SRDNAKSTLY |
| | NO: 21 | LQLNSLRAED TAVYFCARLR RNVADQITHN YYMDVWGKGT |
| | | LVTVSSASTK GPSVFPLAPS SKSTSGGTAA LGCLVKDYFP |
| | | EPVTVSWNSG ALTSGVHTFP AVLQSSGLYS LSSVVTVPSS |
| | | SLGTQTYICN VNHKPSNTKV DKKVEPKSCD +/- KTHT |
| | | (or KTHL) +/- CPPCPA +/- PEAAGGPSVFL |
| NI-204.10D12 | Light/ | DIQMTQSPSS LSASVGDRVT ACRASQSVGT YLNWYQQKRG |
| | SEQ ID | KAPKLLIFAA SSLQSGVPSR FSGSGSGTDF TLTISSLQPE |
| | NO: 22 | DFATYYCQQS YSSPPTFGQG TKVEIKRTVA APSVFIFPPS |
| | | DEQLKSGTAS VVCLLNNFYP REAKVQWKVD NALQSGNSQE |
| | | SVTEQDSKDS TYSLSSTLTL SKADYEKHKV YACEVTHQGL |
| | | SSPVTKSFNR GEC |
| NI-204.12G7 | Heavy/ | QVQLVQSGAE VKKPGASVTL SCKASGYTFT AYYIHWVRQA |
| | SEQ ID | REQGLEWMGV INPSTGTTFY AQNFPDRVSV TRDTSTSTVF |
| | NO: 23 | MELHNLKSED TAVYYCARAI SEHGSGSYSP YYWGQGTLVT |
| | | VSSASTKGPS VFPLAPSSKS TSGGTAALGC LVKDYFPEPV |
| | | TVSWNSGALT SGVHTFPAVL QSSGLYSLSS VVTVPSSSLG |
| | | TQTYICNVNH KPSNTKVDKK VEPKSCD +/- KTHT (or KTHL)+/- |
| | | CPPCPA +/- PEAAGGPSVFL |
| NI-204.12G7 | Light/ | SYELTQPPSV SVSLGQMAAI TCSGEALPKK YGYWYQQKPG |
| | SEQ ID | QVPVLLIYRD VERPSGVPDR FSGSSSGTMV TLTISGVQAE |
| | NO: 24 | DEADYYCLSA DSSGTWVFGG GTKLTVLGQP KANPTVTLFP |
| | | PSSEELQANK ATLVCLISDF YPGAVTVAWK ADGSPVKAGV |
| | | ETTKPSKQSN NKYAASSYLS LTPEQWKSHR SYSCQVTHEG |
| | | STVEKTVAPT ECS |
| Eptinezumab | Heavy/ | EVQLVESGGG LVQPGGSLRL SCAVSGIDLS GYYMNWVRQA |
| | SEQ ID | PGKGLEWVGV IGINGATYYA SWAKGRFTIS RDNSKTTVYL |
| | NO: 25 | QMNSLRAEDT AVYFCARGDI WGQGTLVTVS SASTKGPSVF |
| | | PLAPSSKSTS GGTAALGCLV KDYFPEPVTV SWNSGALTSG |
| | | VHTFPAVLQS SGLYSLSSVV TVPSSSLGTQ TYICNVNHKP |
| | | SNTKVDARVE PKSCD +/- KTHT (or KTHL) +/- |
| | | CPPCPA +/- PELLGGPSVTL |
| Eptinezumab | Light/ | QVLTQSPSSL SASVGDRVTI NCQASQSVYH NTYLAWYQQK |
| | SEQ ID | PGKVPKQLIY DASTLASGVP SRFSGSGSGT DFTLTISSLQ |
| | NO: 26 | PEDVATYYCL GSYDCTNGDC FVFGGGTKVE IKRTVAAPSV |
| | | FIFPPSDEQL KSGTASVVCL LNNFYPREAK VQWKVDNALQ |
| | | SGNSQESVTE QDSKDSTYSL SSTLTLSKAD YEKHKVYACE |
| | | VTHQGLSSPV TKSFNRGEC |
| Fremanezumab | Heavy/ | EVQLVESGGG LVQPGGSLRL SCAASGFTFS NYWISWVRQA |
| | SEQ ID | PGKGLEWVAE IRSESDASAT HYAEAVKGRF TISRDNAKNS |
| | NO: 27 | LYLQMNSLRA EDTAVYYCLA YFDYGLAIQN YWGQGTLVTV |
| | | SSASTKGPSV FPLAPCSRST SESTAALGCL VKDYFPEPVT |
| | | VSWNSGALTS GVHTFPAVLQ SSGLYSLSSV VTVPSSNFGT |
| | | QTYTCNVDHK PSNTKVDKTV ERKCCVE +/- CPPCPA +/- |
| | | PPVAG |
| Fremanezumab | Light/ | EIVLTQSPAT LSLSPGERAT LSCKASKRVT TYVSWYQQKP |
| | SEQ ID | GQAPRLLIYG ASNRYLGIPA RFSGSGSGTD FTLTISSLEP |
| | NO: 28 | EDFAVYYCSQ SYNYPYTFGQ GTKLEIKRTV AAPSVFIFPP |
| | | SDEQLKSGTA SVVCLLNNFY PREAKVQWKV DNALQSGNSQ |
| | | ESVTEQDSKD STYSLSSTLT LSKADYEKHK VYACEVTHQG |
| | | LSSPVTKSFN RGEC |
| Galcanezumab | Heavy/ | QVQLVQSGAE VKKPGSSVKV SCKASGYTFG NYWMQWVRQA |
| | SEQ ID | PGQGLEWMGA IYEGTGKTVY IQKFADRVTI TADKSTSTAY |
| | NO: 29 | MELSSLRSED TAVYYCARLS DYVSGFGYWG QGTTVTVSSA |
| | | STKGPSVFPL APCSRSTSES TAALGCLVKD YFPEPVTVSW |
| | | NSGALTSGVH TFPAVLQSSG LYSLSSVVTV PSSSLGTKTY |
| | | TCNVDHKPSN TKVDKRVESK Y +/- GPPCPPCPA (or |
| | | GPPCPSCPA) +/- PEAAGGPSVFL |
| Galcanezumab | Light/ | DIQMTQSPSS LSASVGDRVT ITCRASKDIS KYLNWYQQKP |
| | SEQ ID | GKAPKLLIYY TSGYHSGVPS RFSGSGSGTD FTLTISSLQP |
| | NO: 30 | EDFATYYCQQ GDALPPTFGG GTKVEIKRTV AAPSVFIFPP |
| | | SDEQLKSGTA SVVCLLNNFY PREAKVQWKV DNALQSGNSQ |
| | | ESVTEQDSKD STYSLSSTLT LSKADYEKHK VYACEVTHQG |
| | | LSSPVTKSFN RGEC |
| Sevacizumab | Heavy/ | EVQLVESGGG LVKPGGSLRL SCAASGFSFS NNDVMCWVRQ |
| | SEQ ID | APGKGLEWIG CIMTTDVVTE YANWAKSRFT VSRDSAKNSV |
| | NO: 31 | YLQMNSLRAE DTAVYFCARD SVGSPLMSFD LWGPGTLVTV |
| | | SSASTKGPSV FPLAPSSKST SGGTAALGCL VKDYFPEPVT |
| | | VSWNSGALTS GVHTFPAVLQ SSGLYSLSSV VTVPSSSLGT |
| | | QTYICNVNHK PSNTKVDKKV EPKSCD +/- KTHT (or |
| | | KTHL) +/- CPPCPA +/- PELLGGPSVFL |
| Sevacizumab | Light/ | DIQMTQSPSS LSASVGDRVT INCQASQSIY NNNELSWYQQ |
| | SEQ ID | KPGKPPKLLI YRASTLASGV PSRFSGSGSG TDFTLTISSL |
| | NO: 32 | QPEDVATYYC GGYKSYSNDG NGFGGGTKVE IKRTVAAPSV |
| | | FIFPPSDEQL KSGTASVVCL LNNFYPREAK VQWKVDNALQ |
| | | SGNSQESVTE QDSKDSTYSL SSTLTLSKAD YEKHKVYACE |
| | | VTHQGLSSPV TKSFNRGEC |
| LKA-651 NVS2 | Heavy/ | EVQLVQSGAE VKKPGESLKI SCKGSGYSFT SYWIGWVRQM |
| | SEQ ID | PGKGLEWMGW IDPYRSEIRY SPSFQGQVTI SADKSISTAY |
| | NO: 33 | LQWSSLKASD TAMYYCARVS SEPFDSWGQG TLVTVSSAST |
| | | KGPSVFPLAP SSKSTSGGTA ALGCLVKDYF PEPVTVSWNS |
| | | GALTSGVHTF PAVLQSSGLY SLSSVVTVPS SSLGTQTYIC |
| | | NVNHKPSNTK VDKRVEPKSC D +/- KTHT (or KTHL) |
| | | CPPCPA +/- PELLGGPSVFL |
| LKA-651 NVS2 | Light/ | SYVLTQPPSV SVAPGKTARI TCSGDKLGDH YAYWYQQKPG |
| | SEQ ID | QAPVLVIYDD SKRPSGIPER FSGSNSGNTA TLTISRVEAG |
| | NO: 34 | DEADYYCATW TFEGDYVFGG GTKLTVLGQP KAAPSVTLFP |
| | | PSSEELQANK ATLVCLISDF YPGAVTVAWK ADSSPVKAGV |
| | | ETTTPSKQSN NKYAASSYLS LTPEQWKSHR SYSCQVTHEG |
| | | STVEKTVAPT ECS |
| LKA-651 NVS3 | Heavy/ | QVQLQQSGPG LVKPSQTLSL TCAISGDSVS SNTAAWNWIR |
| | SEQ ID | QSPSRGLEWL GVIYYRSKWY NDYAVSVKSR ITINPDTSKN |
| | NO: 35 | QFSLQLNSVT PEDTAVYYCA RSVPGGDPGL EHAFAYWGRG |
| | | TLVTVSSAST KGPSVFPLAP SSKSTSGGTA ALGCLVKDYF |
| | | PEPVTVSWNS GALTSGVHTF PAVLQSSGLY SLSSVVTVPS |
| | | SSLGTQTYIC NVNHKPSNTK VDKRVEPKSC D +/- KTHT |
| | | (or KTHL) +/- CPPCPA +/- PELLGGPSVFL |
| LKA-651 NVS3 | Light/ | SYVLTQPPSV SVAPGKTARI TCSGDNLGTY YVEWYQQKPG |
| | SEQ ID | QAPVLVIYDD SDRPSGIPER FSGSNSGNTA TLTISRVEAG |
| | NO: 36 | DEADYYCASF ASWSDSVFGG GTKLTVLGQP KAAPSVTLFP |
| | | PSSEELQANK ATLVCLISDF YPGAVTVAWK ADSSPVKAGV |
| | | ETTTPSKQSN NKYAASSYLS LTPEQWKSHR SYSCQVTHEGS |
| | | TVEKTVAPTE CS |
| Ascrinvacumab | Heavy/ | QVQLQESGPG LVKPSQTLSL TCTVSGGSIS SGEYYWNWIR |
| | SEQ ID | QHPGKGLEWI GYIYYSGSTY YNPSLKSRVT ISVDTSKNQF |
| | NO: 37 | SLKLSSVTAA DTAVYYCARE SVAGFDYWGQ GTLVTVSSAS |
| | | TKGPSVFPLA PCSRSTSEST AALGCLVKDY FPEPVTVSWN |
| | | SGALTSGVHT FPAVLQSSGL YSLSSVVTVP SSNFGTQTYT |
| | | CNVDHKPSNT KVDKTVERKC CVE +/- CPPCPA +/- PPVAG |
| Ascrinvacumab | Light/ | EIVLTQSPGT LSLSPGERAT LSCRASQSVS SSYLAWYQQK |
| | SEQ ID | PGQAPRLLIY GTSSRATGIP DRFSGSGSGT DFTLTISRLE |
| | NO: 38 | PEDFAVYYCQ QYGSSPITFG QGTRLEIKRT VAAPSVFIFP |
| | | PSDEQLKSGT ASVVCLLNNF YPREAKVQWK VDNALQSGN |
| | | SQESVTEQDS KDSTYSLSST LTLSKADYEK HKVYACEVTH |
| | | QGLSSPVTKS FNRGEC |
| Tesidolumab | Heavy/ | EVQLVQSGAE VKKPGSSVKV SCKASGGTFS SYAISWVRQA |
| | SEQ ID | PGQGLEWMGG IGPFFGTANY AQKFQGRVTI TADESTSTAY |
| | NO: 39 | MELSSLRSED TAVYYCARDT PYFDYWGQGT LVTVSSASTK |
| | | GPSVFPLAPS SKSTSGGTAA LGCLVKDYFP EPVTVSWNSG |
| | | ALTSGVHTFP AVLQSSGLYS LSSVVTVPSS SLGTQTYICN |
| | | VNHKPSNTKV DKRVEPKSCD +/- KTHT |
| | | (or KTHL) +/- CPPCPA +/- PEAAGGPSVFL |
| Tesidolumab | Light/ | SYELTQPLSV SVALGQTARI TCSGDSIPNY YVYWYQQKPG |
| | SEQ ID | QAPVLVIYDD SNRPSGIPER FSGSNSGNTA TLTISRAQAG |
| | NO: 40 | DEADYYCQSF DSSLNAEVFG GGTKLTVLGQ PKAAPSVTLF |
| | | PPSSEELQAN KATLVCLISD FYPGAVTVAW KADSSPVKAG |
| | | VETTTPSKQS NNKYAASSYL SLTPEQWKSH RSYSCQVTHE |
| | | GSTVEKTVAP TECS |
| Carotuximab | Heavy/ | EVKLEESGGG LVQPGGSMKL SCAASGFTFS DAWMDWVRQS |
| | SEQ ID | PEKGLEWVAE IRSKASNHAT YYAESVKGRF TISRDDSKSS |
| | NO: 41 | VYLQMNSLRA EDTGIYYCTR WRRFFDSWGQ GTTLTVSSAS |
| | | TKGPSVFPLA PSSKSTSGGT AALGCLVKDY FPEPVTVSWN |
| | | SGALTSGVHT FPAVLQSSGL YSLSSVVTVP SSSLGTQTYI |
| | | CNVNHKPSNT KVDKKVEPKS CD +/- KTHT (or |
| | | KTHL) +/- CPPCPA +/- PELLGGPSVFL |
| Carotuximab | Light/ | QIVLSQSPAI LSASPGEKVT MTCRASSSVS YMHWYQQKPG |
| | SEQ ID | SSPKPWIYAT SNLASGVPVR FSGSGSGTSY SLTISRVEAE |
| | NO: 42 | DAATYYCQQW SSNPLTFGAG TKLELKRTVA APSVFIFPPS |
| | | DEQLKSGTAS VVCLLNNFYP REAKVQWKVD NALQSGNSQE |
| | | SVTEQDSKDS TYSLSSTLTL SKADYEKHKV YACEVTHQGL |
| | | SSPVTKSFNR GEC |
| ANX-007 | Heavy/ | QVQLVQSGAE LKKPGASVKV SCKSSGYHFT SYWMHWVKQA |
| | SEQ ID | PGQGLEWIGV IHPNSGSINY NEKFESRVTI TVDKSTSTAY |
| | NO: 43 | MELSSLRSED TAVYYCAGER DSTEVLPMDY WGQGTTVTVS |
| | | SASTKGPSVF PLAPSSKSTS GGTAALGCLV KDYFPEPVTV |
| | | SWNSGALTSG VHTFPAVLQS SGLYSLSSVV TVPSSSLGTQ |
| | | TYICNVNHKP SNTKVDKRVE PKSCD +/- KTHT (or KTHL) +/- |
| | | CPPCPA +/- PELLGGPSVFL |
| ANX-007 | Light/ | DVQITQSPSS LSASLGERAT INCRASKSIN KYLAWYQQKP |
| | SEQ ID | GKAPKLLIYS GSTLQSGIPA RFSGSGSGTD FTLTISSLEP |
| | NO: 44 | EDFAMYYCQQ HNEYPLTFGQ GTKLEIKRTV AAPSVFIFPP |
| | | SDEQLKSGTA SVVCLLNNFY PREAKVQWKV DNALQSGNSQ |
| | | ESVTEQDSKD STYSLSSTLT LSKADYEKHK VYACEVTHQG |
| 363 | | LSSPVTKSFN RGEC |
| Adalimumab | Heavy/ | EVQLVESGGG LVQPGRSLRL SCAASGFTFD DYAMHWVRQA |
| | SEQ ID | PGKGLEWVSA ITWNSGHIDY ADSVEGRFTI SRDNAKNSLY |
| | NO: 45 | LQMNSLRAED TAVYYCAKVS YLSTASSLDY WGQGTLVTVS |
| | | SASTKGPSVF PLAPSSKSTS GGTAALGCLV KDYFPEPVTV |
| | | SWNSGALTSG VHTFPAVLQS SGLYSLSSVV TVPSSSLGTQ |
| | | TYICNVNHKP SNTKVDKKVE PKSCD +/- KTHT (or KTHL) +/- |
| | | CPPCPA +/- PELLGGPSVFL |
| Adalimumab | Light/ | DIQMTQSPSS LSASVGDRVT ITCRASQGIR NYLAWYQQKP |
| | SEQ ID | GKAPKLLIYA ASTLQSGVPS RFSGSGSGTD FTLTISSLQP |
| | NO: 46 | EDVATYYCQR YNRAPYTFGQ GTKVEIKRTV AAPSVFIFPP |
| | | SDEQLKSGTA SVVCLLNNFY PREAKVQWKV DNALQSGNSQ |
| | | ESVTEQDSKD STYSLSSTLT LSKADYEKHK VYACEVTHQG |
| | | LSSPVTKSFN RGEC |
| Infliximab | Heavy/ | EVKLEESGGG LVQPGGSMKL SCVASGFIFS NHWMNWVRQS |
| | SEQ ID | PEKGLEWVAE IRSKSINSAT HYAESVKGRF TISRDDSKSA |
| | NO: 47 | VYLQMTDLRT EDTGVYYCSR NYYGSTYDYW GQGTTLTVSS |
| | | ASTKGPSVFP LAPSSKSTSG GTAALGCLVK DYFPEPVTVS |
| | | WNSGALTSGV HTFPAVLQSS GLYSLSSVVT VPSSSLGTQT |
| | | YICNVNHKPS NTKVDKKVEP KSCD +/- KTHT (or |
| | | KTHL)+/- CPPCPA +/- PELLGGPSVFL |
| Infliximab | Light/ | DILLTQSPAI LSVSPGERVS FSCRASQFVG SSIHWYQQRT |
| | SEQ ID | NGSPRLLIKY ASESMSGIPS RFSGSGSGTD FTLSINTVES |
| | NO: 48 | EDIADYYCQQ SHSWPFTFGS GTNLEVKRTV AAPSVFIFPP |
| | | SDEQLKSGTA SVVCLLNNFY PREAKVQWKV DNALQSGNSQ |
| | | ESVTEQDSKD STYSLSSTLT LSKADYEKHK VYACEVTHQG |
| | | LSSPVTKSFN RGEC |
| Golimumab | Heavy/ | SKLQVQLVES GGGVVQPGRS LRLSCAASGF IFSSYAMHWV |
| | SEQ ID | RQAPGNGLEW VAFMSYDGSN KKYADSVKGR FTISRDNSKN |
| | NO: 49 | TLYLQMNSLR AEDTAVYYCA RDRGIAAGGN YYYYGMDVWG |
| | | QGTTVTVSSA STKGPSVFPL APSSKSTSGG TAALGCLVKD |
| | | YFPEPVTVSW NSGALTSGVH TFPAVLQSSG LYSLSSVVTV |
| | | PSSSLGTQTY ICNVNHKPSN TKVDKKVEPK SCD +/- |
| | | KTHT (or KTHL) +/- CPPCPA +/- PELLGGPSVFL |
| Golimumab | Light/ | AGSEIVLTQS PATLSLSPGE RATLSCRASQ SVYSYLAWYQ |
| | SEQ ID | QKPGQAPRLL IYDASNRATG IPARFSGSGS GTDFTLTISS |
| | NO: 50 | LEPEDFAVYY CQQRSNWPPF TFGPGTKVDI KRTVAAPSVF |
| | | IFPPSDEQLK SGTASVVCLL NNFYPREAKV QWKVDNALQS |
| | | GNSQESVTEQ DSKDSTYSLS STLTLSKADY EKHKVYACEV |
| | | THQGLSSPVT KSFNRGEC |
| Elezanumab | Heavy/ | EVQLVQSGAE VKKPGASVKV SCKASGYTFT SHGISWVRQA |
| | SEQ ID | PGQGLDWMGW ISPYSGNTNY AQKLQGRVTM TTDTSTSTAY |
| | NO: 51 | MELSSLRSED TAVYYCARVG SGPYYYMDVW GQGTLVTVSS |
| | | ASTKGPSVFP LAPSSKSTSG GTAALGCLVK DYFPEPVTVS |
| | | WNSGALTSGV HTFPAVLQSS GLYSLSSVVT VPSSSLGTQT |
| | | YICNVNHKPS NTKVDKKVEP KSCD +/- KTHT (or |
| | | KTHL)+/- CPPCPA +/- PEAAGGPSVFL |
| Elezanumab | Light/ | QSALTQPRSV SGSPGQSVTI SCTGTSSSVG DSIYVSWYQQ |
| | SEQ ID | HPGKAPKLML YDVTKRPSGV PDRFSGSKSG NTASLTISGL |
| | NO: 52 | QAEDEADYYC YSYAGTDTLF GGGTKVTVLG QPKAAPSVTL |
| | | FPPSSEELQA NKATLVCLIS DFYPGAVTVA WKADSSPVKA |
| | | GVETTTPSKQ SNNKYAASSY LSLTPEQWKS HRSYSCQVTH |
| | | EGSTVEKTVA PTECS |
| NI-301 | Heavy/ | QVQLQESGPG LVKPSETLSL TCSVSGGSII SRSSYWGWIR |
| | SEQ ID | QPPGKGLEWI GGIYHSGNTY DNPSLKSRLT MSVDTSKNQF |
| | NO: 53 | SLNLRSVTAA DTAVYYCARI VPGGDAFDIW GQGTMVTVSS |
| | | ASTKGPSVFP LAPSSKSTSG GTAALGCLVK DYFPEPVTVS |
| | | WNSGALTSGV HTFPAVLQSS GLYSLSSVVT VPSSSLGTQT |
| | | YICNVNHKPS NTKVDKRVEP KSCD +/- KTHT (or KTHL)+/- |
| | | CPPCPA +/- PELLGGPSVFL |
| NI-301 | Light/ | DIQMTQSPSS LSASVGDRVT ACRASQSVGT YLNWYQQKRG |
| | SEQ ID | KAPKLLIFAA SSLQSGVPSR FSGSGSGTDF TLTISSLQPE |
| | NO: 54 | DFATYYCQQS YSSPPTFGQG TKVEIKRTVA APSVFIFPPS |
| | | DEQLKSGTAS VVCLLNNFYP REAKVQWKVD NALQSGNSQE |
| | | SVTEQDSKDS TYSLSSTLTL SKADYEKHKV YACEVTHQGL |
| | | SSPVTKSFNR GEC |
| PRX-004 | Heavy/ | EVQLVESGGG LIQPGGSLRL SCAASGFTFS NYAMSWVRQA |
| | SEQ ID | PGKGLEWVSS ISSGGSTYYP DSVKGRFTIS RDNSKNTLYL |
| | NO: 55 | QMNSLRAEDT AVYYCARYYY GQYFDFWGQG TLVTVSSAST |
| | | KGPSVFPLAP SSKSTSGGTA ALGCLVKDYF PEPVTVSWNS |
| | | GALTSGVHTF PAVLQSSGLY SLSSVVTVPS SSLGTQTYIC |
| | | NVNHKPSNTK VDKRVEPKSC D +/- |
| | | KTHT (or KTHL) +/- CPPCPA +/- PELLGGPSVFL |
| PRX-004 | Light/ | DIVMTQSPSS LSASVGDRVT ITCKASQDVS TTVAWYQQKP |
| | SEQ ID | GKAPKLLIYS ASYRSTGVPS RFSGSGSGTD FTLTISSLQP |
| | NO: 56 | EDFAVYYCQQ HYSTPLTFGG GTKVEIKRTV AAPSVFIFPP |
| | | SDEQLKSGTA SVVCLLNNFY PREAKVQWKV DNALQSGNSQ |
| | | ESVTEQDSKD STYSLSSTLT LSKADYEKHK VYACEVTHQG |
| | | LSSPVTKSFN RGEC |
| Pamrevlumab | Heavy/ | EVQLVQSGAE VKKPGSSVKV SCKASGGTFS SYAISWVRQA |
| | SEQ ID | PGQGLEWMGG IGPFFGTANY AQKFQGRVTI TADESTSTAY |
| | NO: 57 | MELSSLRSED TAVYYCARDT PYFDYWGQGT LVTVSSASTK |
| | | GPSVFPLAPS SKSTSGGTAA LGCLVKDYFP EPVTVSWNSG |
| | | ALTSGVHTFP AVLQSSGLYS LSSVVTVPSS SLGTQTYICN |
| | | VNHKPSNTKV DKRVEPKSCD +/- KTHT (or KTHL)+/- |
| | | CPPCPA +/- PEAAGGPSVFL |
| Pamrevlumab | Light/ | SYELTQPLSV SVALGQTARI TCSGDSIPNY YVYWYQQK2G |
| | SEQ ID | QAPVLVIYDD SNRPSGIPER FSGSNSGNTA TLTISRAQAG |
| | NO: 58 | DEADYYCQSF DSSLNAEVFG GGTKLTVLGQ PKAAPSVTLF |
| | | PPSSEELQAN KATLVCLISD FYPGAVTVAW KADSSPVKAG |
| | | VETTTPSKQS NNKYAASSYL SLTPEQWKSH RSYSCQVTHE |
| | | GSTVEKTVAP TECS |
| Satralizumab | Heavy/ | QVQLQESGPG LVKPSETLSL TCAVSGHSIS HDHAWSWVRQ |
| | SEQ ID | PPGEGLEWIG FISYSGITNY NPSLQGRVTI SRDNSKNTLY |
| | NO: 59 | LQMNSLRAED TAVYYCARSL ARTTAMDYWG EGTLVTVSSA |
| | | STKGPSVFPL APSSKSTSGG TAALGCLVKD YFPEPVTVSW |
| | | NSGALTSGVH TFPAVLQSSG LYSLSSVVTV PSSNFGTQTY |
| | | TCNVDHKPSN TKVDKTVERK SCVE +/- CPPCPA +/- |
| | | PPVAG |
| Satralizumab | Light/ | DIQMTQSPSS LSASVGDSVT ITCQASTDIS SHLNWYQQKP |
| | SEQ ID | GKAPELLIYY GSHLLSGVPS RFSGSGSGTD FTFTISSLEA |
| | NO: 60 | EDAATYYCGQ GNRLPYTFGQ GTKVEIERTV AAPSVFIFPP |
| | | SDEQLKSGTA SVVCLLNNFY PREAKVQWKV DNALQSGNSQ |
| | | ESVTEQDSKD STYSLSSTLT LSKADYEKHK VYACEVTHQG |
| | | LSSPVTKSFN RGEC |
| Sarilumab | Heavy/ | EVQLVESGGG LVQPGRSLRL SCAASRFTFD DYAMHWVRQA |
| | SEQ ID | PGKGLEWVSG ISWNSGRIGY ADSVKGRFTI SRDNAENSLF |
| | NO: 61 | LQMNGLRAED TALYYCAKGR DSFDIWGQGT MVTVSSASTK |
| | | GPSVFPLAPS SKSTSGGTAA LGCLVKDYFP EPVTVSWNSG |
| | | ALTSGVHTFP AVLQSSGLYS LSSVVTVPSS SLGTQTYICN |
| | | VNHKPSNTKV DKKVEPKSCD +/- KTHT (or KTHL)+/- |
| | | CPPCPA +/- PELLGGPSVFL |
| Sarilumab | Light/ | DIQMTQSPSS VSASVGDRVT ITCRASQGIS SWLAWYQQKP |
| | SEQ ID | GKAPKLLIYG ASSLESGVPS RFSGSGSGTD FTLTISSLQP |
| | NO: 62 | EDFASYYCQQ ANSFPYTFGQ GTKLEIKRTV AAPSVFIFPP |
| | | SDEQLKSGTA SVVCLLNNFY PREAKVQWKV DNALQSGNSQ |
| | | ESVTEQDSKD STYSLSSTLT LSKADYEKHK VYACEVTHQG |
| | | LSSPVTKSFN RGEC |
| Inebilizumab | Heavy/ | EVQLVESGGG LVQPGGSLRL SCAASGFTFS SSWMNWVRQA |
| | SEQ ID | PGKGLEWVGR IYPGDGDTNY NVKFKGRFTI SRDDSKNSLY |
| | NO: 63 | LQMNSLKTED TAVYYCARSG FITTVRDFDY WGQGTLVTVS |
| | | SASTKGPSVF PLAPSSKSTS GGTAALGCLV KDYFPEPVTV |
| | | SWNSGALTSG VHTFPAVLQS SGLYSLSSVV TVPSSSLGTQ |
| | | TYICNVNHKP SNTKVDKRVE PKSCD +/- KTHT (or |
| | | KTHL)+/- CPPCPA +/- PELLGGPSVFL |
| Inebilizumab | Light/ | EIVLTQSPD FQSVTPKEK VTITCRASE SVDTFGISF MNWFQQKPD |
| | SEQ ID | QSPKLLIHE ASNQGSGVP SRFSGSGSG TDFTLTINS LEAEDAATY |
| | NO: 64 | YCQQSKEVP FTFGGGTKV EIKRTVAAP SVFIFPPSD EQLKSGTAS |
| | | VVCLLNNFY PREAKVQWK VDNALQSGN SQESVTEQD SKDSTYSLS |
| | | STLTLSKAD YEKHKVYAC EVTHQGLSS PVTKSFNRGEC |
| Etrolizumab | Heavy/ | EVQLVESGGG LVQPGGSLRL SCAASGFFIT NNYWGWVRQA |
| | SEQ ID | PGKGLEWVGY ISYSGSTSYN PSLKSRFTIS RDTSKNTFYL |
| | NO: 65 | QMNSLRAEDT AVYYCARTGS SGYFDFWGQG TLVTVSSAST |
| | | KGPSVFPLAP SSKSTSGGTA ALGCLVKDYF PEPVTVSWNS |
| | | GALTSGVHTF PAVLQSSGLY SLSSVVTVPS SSLGTQTYIC |
| | | NVNHKPSNTK VDKKVEPKSCD +/- KTHT (or KTHL) +/- |
| | | CPPCPA +/- PELLGGPSVFL |
| Etrolizumab | Light/ | DIQMTQSPSS LSASVGDRVT ITCRASESVD DLLHWYQQKP |
| | SEQ ID | GKAPKLLIKY ASQSISGVPS RFSGSGSGTD FTLTISSLQP |
| | NO: 66 | EDFATYYCQQ GNSLPNTFGQ GTKVEIKRTV AAPSVFIFPP |
| | | SDEQLKSGTA SVVCLLNNFY PREAKVQWKV DNALQSGNSQ |
| | | ESVTEQDSKD STYSLSSTLT LSKADYEKHK VYACEVTHQG |
| | | LSSPVTKSFN RGEC |
| Romosozumab | Heavy/ | EVQLVQSGAE VKKPGASVKV SCKASGYTFT DYNMHWVRQA |
| | SEQ ID | PGQGLEWMGE INPNSGGAGY NQKFKGRVTM TTDTSTSTAY |
| | NO: 67 | MELRSLRSDD TAVYYCARLG YDDIYDDWYF DVWGQGTTVT |
| | | VSSASTKGPS VFPLAPCSRS TSESTAALGC LVKDYFPEPV |
| | | TVSWNSGALT SGVHTFPAVL QSSGLYSLSS WTVPSSNFG |
| | | TQTYTCNVDH KPSNTKVDKT VERKCCVE +/- CPPCPA+/- PPVAG |
| Romosozumab | Light/ | DIQMTQSPSS LSASVGDRVT ITCRASQDIS NYLNWYQQKP |
| | SEQ ID | GKAPKLLIYY TSRLLSGVPS RFSGSGSGTD FTLTISSLQP |
| | NO: 68 | EDFATYYCQQ GDTLPYTFGG GTKVEIKRTV AAPSVFIFPP |
| | | SDEQLKSGTA SVVCLLNNFY PREAKVQWKV DNALQSGNSQ |
| | | ESVTEQDSKD STYSLSSTLT LSKADYEKHK VYACEVTHQG |
| | | LSSPVTKSFN RGEC |
| Lanadelumab | Heavy/ | EVQLLESGGG LVQPGGSLRL SCAASGFTFS HYIMMWVRQA |
| | SEQ ID | PGKGLEWVSG IYSSGGITVY ADSVKGRFTI SRDNSKNTLY |
| | NO: 69 | LQMNSLRAED TAVYYCAYRR IGVPRRDEFD IWGQGTMVTV |
| | | SSASTKGPSV FPLAPSSKST SGGTAALGCL VKDYFPEPVT |
| | | VSWNSGALTS GVHTFPAVLQ SSGLYSLSSV VTVPSSSLGT |
| | | QTYICNVNHK PSNTKVDKRV EPKSCD +/- KTHT (or KTHL) +/- |
| | | CPPCPA +/- PELLGGPSVFL |
| Lanadelumab | Light/ | DIQMTQSPST LSASVGDRVT ITCRASQSIS SWLAWYQQKP |
| | SEQ ID | GKAPKLLIYK ASTLESGVPS RFSGSGSGTE FTLTISSLQP |
| | NO: 70 | DDFATYYCQQ YNTYWTFGQG TKVEIKRTVA APSVFIFPPS |
| | | DEQLKSGTAS WCLLNNFYP REAKVQWKVD NALQSGNSQE |
| | | SVTEQDSKDS TYSLSSTLTL SKADYEKHKV YACEVTHQGL |
| | | SSPVTKSFNR GEC |
| Siltuximab | Heavy/ | EVQLVESGGK LLKPGGSLKL SCAASGFTFS SFAMSWFRQS |
| | SEQ ID | PEKRLEWVAE ISSGGSYTYY PDTVTGRFTI SRDNAKNTLY |
| | NO: 331 | LEMSSLRSED TAMYYCARGL WGYYALDYWG QGTSVTVSSA |
| | | STKGPSVFPL APSSKSTSGG TAALGCLVKD YFPEPVTVSW |
| | | NSGALTSGVH TFPAVLQSSG LYSLSSVVTV PSSSLGTQTY |
| | | ICNVNHKPSN TKVDKKVEPK SCD +/- KTHT (or KTHL) +/- |
| | | CPPCPA +/- PELLGGPSVFL |
| Siltuximab | Heavy/ | QIVLIQSPAI MSASPGEKVT MTCSASSSVS YMYWYQQKPG |
| | SEQ ID | SSPRLLIYDT SNLASGVPVR FSGSGSGTSY SLTISRMEAE |
| | NO: 332 | DAATYYCQQW SGYPYTFGGG TKLEIKRTVA APSVFIFPPS |
| | | DEQLKSGTAS VVCLLNNFYP REAKVQWKVD NALQSGNSQE |
| | | SVTEQDSKDS TYSLSSTLTL SKADYEKHKV YACEVTHQGL |
| | | SSPVTKSFNR GEC |
| Clazakizumab | Heavy/ | EVQLVESGGG LVQPGGSLRL SCAASGFSLS NYYVTWVRQA |
| | SEQ ID | PGKGLEWVGI IYGSDETAYA TSAIGRFTIS RDNSKNTLYL |
| | NO: 333 | QMNSLRAEDT AVYYCARDDS SDWDAKFNLW GQGTLVTVSS |
| | | ASTKGPSVFP LAPSSKSTSG GTAALGCLVK DYFPEPVTVS |
| | | WNSGALTSGV HTFPAVLQSS GLYSLSSVVT VPSSSLGTQT |
| | | YICNVNHKPS NTKVDKRVEP KSCD +/- KTHT (or KTHL) +/- |
| | | CPPCPA +/- PELLGGPSVFL |
| Clazakizumab | Light/ | AIQMTQSPSS LSASVGDRVT ITCQASQSIN NELSWYQQKP |
| | SEQ ID | GKAPKLLIYR ASTLASGVPS RFSGSGSGTD FTLTISSLQP |
| | NO: 334 | DDFATYYCQQ GYSLRNIDNA FGGGTKVEIK RTVAAPSVFI |
| | | FPPSDEQLKS GTASVVCLLN NFYPREAKVQ WKVDNALQSG |
| | | NSQESVTEQD SKDSTYSLSS TLTLSKADYE KHKVYACEVT |
| | | HQGLSSPVTK SFNRGEC |
| Sirukumab | Heavy/ | EVQLVESGGG LVQPGGSLRL SCAASGFTFS PFAMSWVRQA |
| | SEQ ID | PGKGLEWVAK ISPGGSWTYY SDTVTGRFTI SRDNAKNSLY |
| | NO: 335 | LQMNSLRAED TAVYYCARQL WGYYALDIWG QGTTVTVSSA |
| | | STKGPSVFPL APSSKSTSGG TAALGCLVKD YFPEPVTVSW |
| | | NSGALTSGVH TFPAVLQSSG LYSLSSVVTV PSSSLGTQTY |
| | | ICNVNHKPSN TKVDKKVEPK SCD +-/ KTHT (or KTHL) +/- |
| | | CPPCPA +-/ PELLGGPSVFL |
| Sirukumab | Light/ | EIVLTQSPAT LSLSPGERAT LSCSASISVS YMYWYQQKPG |
| | SEQ ID | QAPRLLIYDM SNLASGIPAR FSGSGSGTDF TLTISSLEPE |
| | NO: 336 | DFAVYYCMQW SGYPYTFGGG TKVEIKRTVA APSVFIFPPS |
| | | DEQLKSGTAS VVCLLNNFYP REAKVQWKVD NALQSGNSQE |
| | | SVTEQDSKDS TYSLSSTLTL SKADYEKHKV YACEVTHQGL |
| | | SSPVTKSFNR GEC |
| Olokizumab | Heavy/ | EVQLVESGGG LVQPGGSLRL SCAASGFNFN DYFMNWVRQA |
| | SEQ ID | PGKGLEWVAQ MRNKNYQYGT YYAESLEGRF TISRDDSKNS |
| | NO: 337 | LYLQMNSLKT EDTAVYYCAR ESYYGFTSYW GQGTLVTVSS |
| | | ASTKGPSVFP LAPCSRSTSE STAALGCLVK DYFPEPVTVS |
| | | WNSGALTSGV HTFPAVLQSS GLYSLSSVVT VPSSSLGTKT |
| | | YTCNVDHKPS NTKVDKRVES KY +/- GPPCPPCPA (or |
| | | GPPCPSCPA) +/- PEFLGGPSVFL |
| Olokizumab | Light/ | DIQMTQSPSS LSASVGDRVT ITCQASQDIG ISLSWYQQKP |
| | SEQ ID | GKAPKLLIYN ANNLADGVPS RFSGSGSGTD FTLTISSLQP |
| | NO: 338 | EDFATYYCLQ HNSAPYTFGQ GTKLEIKRTV AAPSVFIFPP |
| | | SDEQLKSGTA SVVCLLNNFY PREAKVQWKV DNALQSGNSQ |
| | | ESVTEQDSKD STYSLSSTLT LSKADYEKHK VYACEVTHQG |
| | | LSSPVTKSFN RGEC |
| Gerilimzumab | Heavy/ | EVQLQESGPG LVKPSQTLSL TCTVSGGSIT SRYYAWSWIR |
| | SEQ ID | QPPGKGLEWI GVIDYDGDTY YSPSLKSRVS ISWDTSKNQF |
| | NO: 339 | SLKLSSVTPA DTAVYYCARD PDVVTGFHYD YWGQGTMVTV |
| | | SSASTKGPSV FPLAPSSKST SGGTAALGCL VKDYFPEPVT |
| | | VSWNSGALTS GVHTFPAVLQ SSGLYSLSSV VTVPSSSLGT |
| | | QTYICNVNHK PSNTKVDKKV EPKSCD +/- KTHT (or KTHL) +/- |
| | | CPPCPA +-/ PELLGGPSVFL |
| Gerilimzumab | Light/ | QSALTQPPSV SGTPGQSVTI SCAGANNDIG TYAYVSWYQQ |
| | SEQ ID | LPGTAPKLMI YKVTTRASGI PDRFSGSKSG NTASLTISGL |
| | NO: 340 | QAEDEADYYC ASYRNFNNAV FGTGTKLTVL GQPKAAPSVT |
| | | LFPPSSEELQ ANKATLVCLI SDFYPGAVTV AWKADSSPVK |
| | | AGVETTTPSK QSNNKYAASS YLSLTPEQWK SHRSYSCQVT |
| | | HEGSTVEKTV APTECS |
| Tocilizumab | Heavy/ | QVQLQESGPG LVRPSQTLSL TCTVSGYSIT SDHAWSWVRQ |
| | SEQ ID | PPGRGLEWIG YISYSGITTY NPSLKSRVTM LRDTSKNQFS |
| | NO: 341 | LRLSSVTAAD TAVYYCARSL ARTTAMDYWG QGSLVTVSSA |
| | | STKGPSVFPL APSSKSTSGG TAALGCLVKD YFPEPVTVSW |
| | | NSGALTSGVH TFPAVLQSSG LYSLSSVVTV PSSSLGTQTY |
| | | ICNVNHKPSN TKVDKKVEPK SCD +/- KTHT (or KTHL) +/- |
| | | CPPCPA +/- PELLGGPSVFL |
| Tocilizumab | Light/ | DIQMTQSPSS LSASVGDRVT ITCRASQDIS SYLNWYQQKP |
| | SEQ ID | GKAPKLLIYY TSRLHSGVPS RFSGSGSGTD FTFTISSLQP |
| | NO: 342 | EDIATYYCQQ GNTLPYTFGQ GTKVEIKRTV AAPSVFIFPP |
| | | SDEQLKSGTA SVVCLLNNFY PREAKVQWKV DNALQSGNSQ |
| | | ESVTEQDSKD STYSLSSTLT LSKADYEKHK VYACEVTHQG |
| | | LSSPVTKSFN RGEC |
| Lecanemab | Heavy/ | EVQLVESGGG LVQPGGSLRL SCSASGFTFS SFGMHWVRQA |
| | SEQ ID | PGKGLEWVAY ISSGSSTIYY GDTVKGRFTI SRDNAKNSLF |
| | NO: 360 | LQMSSLRAED TAVYYCAREG GYYYGRSYYT MDYWGQGTTV |
| | | TVSSASTKGP SVFPLAPSSK STSGGTAALG CLVKDYFPEP |
| | | VTVSWNSGAL TSGVHTFPAV LQSSGLYSLS SVVTVPSSSL |
| | | GTQTYICNVN HKPSNTKVDK RVEPKSCD +/- KTHT +/- CPPCPA |
| | | +/- PELLGGPSVFL |
| Lecanemab | Light/ | DVVMTQSPLS LPVTPGAPAS ISCRSSQSIV HSNGNTYLEW |
| | SEQ ID | YLQKPGQSPK LLIYKVSNRF SGVPDRFSGS GSGTDFTLRI |
| | NO: 361 | SRVEAEDVGI YYCFQGSHVP PTFGPGTKLE IKRTVAAPSV |
| | | FIFPPSDEQL KSGTASVVCL LNNFYPREAK VQWKVDNALQ |
| | | SGNSQESVTE QDSKDSTYSL SSTLTLSKAD YEKHKVYACE |
| | | VTHQGLSSPV TKSFNRGEC |
| Ravulizumab | Heavy/ | QVQLVQSGA3 VKKPGASVKV SCKASGHIFS NYWIQWVRQA |
| | SEQ ID | PGQGLEWMGE ILPGSGHTEY TENFKDRVTM TRDTSTSTVY |
| | NO: 362 | MELSSLRSED TAVYYCARYE FGSSPNWYFD VWGQGTLVTV |
| | | SSASTKGESV FPLAPCSRST SESTAALGCL VKDYFPEPVT |
| | | VSWNSGALTS GVHTFPAVLQ SSGLYSLSSV VTVPSSNFGT |
| | | QTYTCNVDHK PSNTKVDKTV ERKCCVE +/- CPPCPA+/- PPVAG |
| Ravulizumab | Light/ | DIQMTQSPSS LSASVGDRVT ITCGASENIY GALNWYQQKP |
| | SEQ ID | GKAPKLLIYG ATNLADGVPS RFSGSGSGTD FTITISSLQP |
| | NO: 363 | EDFATYYCQN VLNTPLTFGQ GTKVEIKRTV AAPSVFIFPP |
| | | SDEQLKSGTA SVVCLLNNFY PREAKVQWKV DNALQSGNSQ |
| | | ESVTEQDSKD STYSLSSTLT LSKADYEKHK VYACEVTHQG |
| | | LSSPVTKSFN RGEC |
| Benralizumab | Heavy/ | EVQLVQSGAE VKKPGASVKV SCKASGYTFT SYVIHWVRQR |
| | SEQ ID | PGQGLAWMGY INPYNDGTKY NERFKGKVTI TSDRSTSTVY |
| | NO: 364 | MELSSLRSED TAVYLCGREG IRYYGLLGDY WGQGTLVTVS |
| | | SASTKGPSVF PLAPSSKSTS GGTAALGCLV KDYFPEPVTV |
| | | SWNSGALTSG VHTFPAVLQS SGLYSLSSVV TVPSSSLGTQ |
| | | TYICNVNHKP SNTKVDKKV EPKSCD +/- KTHT (or |
| | | KTHL) +/- CPPCPA +/- PELLGGPSVFL |
| Benralizumab | Light/ | DIQMTQSPSS LSASVGDRVT ITCGTSEDII NYLNWYQQKP |
| | SEQ ID | GKAPKLLIYH TSRLQSGVPS RFSGSGSGTD FTLTISSLQP |
| | NO: 365 | EDFATYYCQQ GYTLPYTFGQ GTKVEIKRTV AAPSVFIFPP |
| | | SDEQLKSGTA SVVCLLNNFY PREAKVQWKV DNALQSGNSQ |
| | | ESVTEQDSKD STYSLSSTLT LSKADYEKHK VYACEVTHQG |
| | | LSSPVTKSFN RGEC |
| Reslizumab | Heavy/ | EVQLVESGGG LVQPGGSLRL SCAVSGLSLT SNSVNWIRQA |
| | SEQ ID | PGKGLEWVGL IWSNGDTDYN SAIKSRFTIS RDTSKSTVYL |
| | NO: 366 | QMNSLRAEDT AVYYCAREYY GYFDYWGQGT LVTVSSASTK |
| | | GPSVFPLAPC SRSTSESTAA LGCLVKDYFP EPVTVSWNSG |
| | | ALTSGVHTFP AVLQSSGLYS LSSVVTVPSS SLGTKTYTCN |
| | | VDHKPSNTKV DKRV ESKY +/- GPPCPPCPA (or GPPCP |
| | | SCPA) +/- PEFLGGPSVFL |
| Reslizumab | Light/ | DIQMTQSPSS LSASVGDRVT ITCLASEGIS SYLAWYQQKP |
| | SEQ ID | GKAPKLLIYG ANSLQTGVPS RFSGSGSATD YTLTISSLQP |
| | NO: 367 | EDFATYYCQQ SYKFPNTFGQ GTKVEVKRTV AAPSVFIFPP |
| | | SDEQLKSGTA SVVCLLNNFY PREAKVQWKV DNALQSGNSQ |
| | | ESVTEQDSKD STYSLSSTLT LSKADYEKHK VYACEVTHQG |
| | | LSSPVTKSFN RGEC |
| Tralokinumab | Heavy/ | QVQLVQSGAE VKKPGASVKV SCKASGYTFT NYGLSWVRQA |
| | SEQ ID | PGQGLEWMGW ISANNGDTNY GQEFQGRVTM TTDTSTSTAY |
| | NO: 368 | MELRSLRSDD TAVYYCARDS SSSWARWFFD LWGRGTLVTV |
| | | SSASTKGPSV FPLAPCSRST SESTAALGCL VKDYFPEPVT |
| | | VSWNSGALTS GVHTFPAVLQ SSGLYSLSSV VTVPSSSLGT |
| | | [chemical structure] |
| | | [chemical structure] |
| Tralokinumab | Light/ | SYVLTQPPSV SVAPGKTARI TCGGNIIGSK LVHWYQQKPG |
| | SEQ ID | QAPVLVIYDD GDRPSGIPER FSGSNSGNTA TLTISRVEAG |
| | NO:369 | DEADYYCQVW DTGSDPVVFG GGTKLTVLGQ PKAAPSVTLF |
| | | PPSSEELQAN KATLVCLISD FYPGAVTVAW KADSSPVKAG |
| | | VETTTPSKQS NNKYAASSYL SLTPEQWKSH RSYSCQVTHE |
| | | GSTVEKTVAP TECS |
| Nemolizumab | Heavy/ | QVQLVQSGAE VKKPGASVKV SCKASGYTFT GYIMNWVRQA |
| | SEQ ID | PGQGLEWMGL INPYNGGTDY NPQFQDRVTI TADKSTSTAY |
| | NO: 370 | MELSSLRSED TAVYYCARDG YDDGPYTLET WGQGTLVTVS |
| | | SASTKGPSVF PLAPSSKSTS GGTAALGCLV KDYFPEPVTV |
| | | SWNSGALTSG VHTFPAVLQS SGLYSLSSVV TVPSSNFGTQ |
| | | TYTCNVDHKP SNTKVDKTVERK SCVE +/- CPPCPA +/- |
| | | PPVAG |
| Nemolizumab | Light/ | DIQMTQSPSS LSASVGDRVT ITCQASEDIY SFVAWYQQKP |
| | SEQ ID | GKAPKLLIYN AQTEAQGVPS RFSGSGSGTD FTLTISSLQP |
| | NO: 371 | EDFATYYCQH HYDSPLTFGG GTKVEIKRTV AAPSVFIFPP |
| | | SDEQLKSGTA SVVCLLNNFY PREAKVQWKV DNALQSGNSQ |
| | | ESVTEQDSKD STYSLSSTLT LSKADYEKHK VYACEVTHQG |
| | | LSSPVTKSFN RGEC |
| Omalizumab | Heavy/ | EVQLVESGGG LVQPGGSLRL SCAVSGYSIT SGYSWNWIRQ |
| | SEQ ID | APGKGLEWVA SITYDGSTNY ADSVKGRFTI SRDDSKNTFY |
| | NO: 372 | LQMNSLRAED TAVYYCARGS HYFGHWHFAV WGQGTLVTVS |
| | | SGPSVFPLAP SSKSTSGGTA ALGCLVKDYF PEPVTVSWNS |
| | | GALTSGVHTF PAVLQSSGLY SLSSVVTVPS SSLGTQTYIC |
| | | NVNHKPSNTK VDKKA EPKSCD +/- KTHT (or |
| | | KTHL) +/- CPPCPA +/- PELLGGPSVFL |
| Omalizumab | Light/ | DIQLTQSPSS LSASVGDRVT ITCRASQSVD YDGDSYMNWY |
| | SEQ ID | QQKPGKAPKL LIYAASYLES GVPSRFSGSG SGTDFTLTIS |
| | NO: 373 | SLQPEDFATY YCQQSHEDPY TFGQGTKVEI KRTVAAPSVF |
| | | IFPPSDEQLK SGTASVVCLL NNFYPREAKV QWKVDNALQS |
| | | GNSQESVTEQ DSKDSTYSLS STLTLSKADY EKHKVYACEV |
| | | THQGLSSPVT KSFNRGEC |
| Tezepelumab | Heavy/ | QMQLVESGGG VVQPGRSLRL SCAASGFTFR TYGMHWVRQA |
| | SEQ ID | PGKGLEWVAV IWYDGSNKHY ADSVKGRFTI TRDNSKNTLN |
| | NO:374 | LQMNSLRAED TAVYYCARAP QWELVHEAFD IWGQGTMVTV |
| | | SSASTKGPSV FPLAPCSRST SESTAALGCL VKDYFPEPVT |
| | | VSWNSGALTS GVHTFPAVLQ SSGLYSLSSV VTVPSSNFGT |
| | | QTYTCNVDHK PSNTKVDKTV ERKCCVE +/- CPPCPA +/- |
| | | PPVAG |
| Tezepelumab | Light/ | SYVLTQPPSV SVAPGQTARI TCGGNNLGSK SVHWYQQKPG |
| | SEQ ID | QAPVLVVYDD SDRPSWIPER FSGSNSGNTA TLTISRGEAG |
| | NO: 375 | DEADYYCQVW DSSSDHVVFG GGTKLTVLGQ PKAAPSVTLF |
| | | PPSSEELQAN KATLVCLISD FYPGAVTVAW KADSSPVKAG |
| | | VETTTPSKQS NNKYAASSYL SLTPEQWKSH RSYSCQVTHE |
| | | GSTVEKTVAP TECS |

TABLE 6
Table of Fab Fragment Nucleic Acid Sequences

| | Chain/ | |
|---|---|---|
| | SEQ ID | |
| mAb | NO: | Sequence |
| Solanezumab | Heavy/ | GAGGTGCAGCTGGTGGAGAGCGGCGGCGGCCTGGTGCAGCCCGGCGGCAGCC |
| | SEQ ID | TGAGGCTGAGCTGCGCCGCCAGCGGCTTCACCTTCAGCAGGTACAGCATGAG |
| | NO: 71 | CTGGGTGAGGCAGGCCCCCGGCAAGGGCCTGGAGCTGGTGGCCCAGATCAAC |
| | | AGCGTGGGCAACAGCACCTACTACCCCGACACCGTGAAGGGCAGGTTCACCA |
| | | TCAGCAGGGACAACGCCAAGAACACCCTGTACCTGCAGATGAACAGCCTGAG |
| | | GGCCGAGGACACCGCCGTGTACTACTGCGCCAGCGGCGACTACTGGGGCCAG |
| | | GGCACCCTGGTGACCGTGAGCAGCGCCAGCACCAAGGGCCCCAGCGTGTTCC |
| | | CCCTGGCCCCCAGCAGCAAGAGCACCAGCGGCGGCACCGCCGCCCTGGGCTG |
| | | CCTGGTGAAGGACTACTTCCCCGAGCCCGTGACCGTGAGCTGGAACAGCGGC |
| | | GCCCTGACCAGCGGCGTGCACACCTTCCCCGCCGTGCTGCAGAGCAGCGGCC |
| | | TGTACAGCCTGAGCAGCGTGGTGACCGTGCCCAGCAGCAGCCTGGGCACCCA |
| | | GACCTACATCTGCAACGTGAACCACAAGCCCAGCAACACCAAGGTGGACAAG |
| | | AAGGTGGAGCCCAAGAGCTGCGAC +/− AAGACCCACACC (or |
| | | AAGACCCACCTG) +/− TGCCCCCCCTGCCCCGCC +/− |
| | | CCCGAGCTGCTGGGCGGCCCCAGCGTGTTCCTG |
| Solanezumab | Light/ | GACGTGGTGATGACCCAGAGCCCCCTGAGCCTGCCCGTGACCCTGGGCCAGC |
| | SEQ ID | CCGCCAGCATCAGCTGCAGGAGCAGCCAGAGCCTGATCTACAGCGACGGCAA |
| | NO: 72 | CGCCTACCTGCACTGGTTCCTGCAGAAGCCCGGCCAGAGCCCCAGGCTGCTG |
| | | ATCTACAAGGTGAGCAACAGGTTCAGCGGCGTGCCCGACAGGTTCAGCGGCA |
| | | GCGGCAGCGGCACCGACTTCACCCTGAAGATCAGCAGGGTGGAGGCCGAGGA |
| | | CGTGGGCGTGTACTACTGCAGCCAGAGCACCCACGTGCCCTGGACCTTCGGC |
| | | CAGGGCACCAAGGTGGAGATCAAGAGGACCGTGGCCGCCCCCAGCGTGTTCA |
| | | TCTTCCCCCCCAGCGACGAGCAGCTGAAGAGCGGCACCGCCAGCGTGGTGTG |
| | | CCTGCTGAACAACTTCTACCCCAGGGAGGCCAAGGTGCAGTGGAAGGTGGAC |
| | | AACGCCCTGCAGAGCGGCAACAGCCAGGAGAGCGTGACCGAGCAGGACAGCA |
| | | AGGACAGCACCTACAGCCTGAGCAGCACCCTGACCCTGAGCAAGGCCGACTA |
| | | CGAGAAGCACAAGGTGTACGCCTGCGAGGTGACCCACCAGGGCCTGAGCAGC |
| | | CCCGTGACCAAGAGCTTCAACAGGGGCGAGTGC |
| GSK933776 | Heavy/ | GAGGTGCAGCTGGTGGAGAGCGGCGGCGGCCTGGTGCAGCCCGGCGGCAGCC |
| | SEQ ID | TGAGGCTGAGCTGCGCC(GCC/GTG)AGCGGCTTCACCTTCAGCGACAACGG |
| | NO: 73 | CATGGCCTGGGTGAGGCAGGCCCCCGGCAAGGGCCTGGAGTGGGTGAGCTTC |
| | | ATCAGCAACCTGGCCTACAGCATCGACTACGCCGACACCGTGACCGGCAGGT |
| | | TCACCATCAGCAGGGACAACGCCAAGAACAGCCTGTACCTGCAGATGAACAG |
| | | CCTGAGGGCCGAGGACACCGCCGTGTACTACTGCGTGAGCGGCACCTGGTTC |
| | | GCCTACTGGGGCCAGGGCACCCTGGTGACCGTGAGCAGCGCCAGCACCAAGG |
| | | GCCCCAGCGTGTTCCCCCTGGCCCCCAGCAGCAAGAGCACCAGCGGCGGCAC |
| | | CGCCGCCCTGGGCTGCCTGGTGAAGGACTACTTCCCCGAGCCCGTGACCGTG |
| | | AGCTGGAACAGCGGCGCCCTGACCAGCGGCGTGCACACCTTCCCCGCCGTGC |
| | | TGCAGAGCAGCGGCCTGTACAGCCTGAGCAGCGTGGTGACCGTGCCCAGCAG |
| | | CAGCCTGGGCACCCAGACCTACATCTGCAACGTGAACCACAAGCCCAGCAAC |
| | | ACCAAGGTGGACAAGAAGGTGGAGCCCAAGAGCTGCGAC +/− AAGACCC |
| | | ACACC (or AAGACCCACCTG) +/− TGCCCCCCCTGCCCCGCC +/− |
| | | CCCGAGCTGGCCGGCGCCCCCAGCGTGTTCCTG |
| GSK933776 | Light/ | GACATCGTGATGACCCAGAGCCCCCTGAGCCTGCCCGTGACCCCCGGCGAGC |
| | SEQ ID | CCGCCAGCATCAGCTGCAGGGTGAGCCAGAGCCTGCTGCACAGCAACGGCTA |
| | NO: 74 | CACCTACCTGCACTGGTACCTGCAGAAGCCCGGCCAGAGCCCCCAGCTGCTG |
| | | ATCTACAAGGTGAGCAACAGGTTCAGCGGCGTGCCCGACAGGTTCAGCGGCA |
| | | GCGGCAGCGGCACCGACTTCACCCTGAAGATCAGCAGGGTGGAGGCCGAGGA |
| | | CGTGGGCGTGTACTACTGCAGCCAGACCAGGCACGTGCCCTACACCTTCGGC |
| | | GGCGGCACCAAGGTGGAGATCAAGAGGACCGTGGCCGCCCCCAGCGTGTTCA |
| | | TCTTCCCCCCCAGCGACGAGCAGCTGAAGAGCGGCACCGCCAGCGTGGTGTG |
| | | CCTGCTGAACAACTTCTACCCCAGGGAGGCCAAGGTGCAGTGGAAGGTGGAC |
| | | AACGCCCTGCAGAGCGGCAACAGCCAGGAGAGCGTGACCGAGCAGGACAGCA |
| | | AGGACAGCACCTACAGCCTGAGCAGCACCCTGACCCTGAGCAAGGCCGACTA |
| | | CGAGAAGCACAAGGTGTACGCCTGCGAGGTGACCCACCAGGGCCTGAGCAGC |
| | | CCCGTGACCAAGAGCTTCAACAGGGGCGAGTGC |
| AL-001 | Heavy/ | CAGGTGCAGCTGGTGCAGAGCGGCGCCGAGGTGAAGAAGCCCGGCGCCAGCG |
| | SEQ ID | TGAAGGTGAGCTGCAAGGCCAGCGGCTACACCTTCACCAAGTACTACATGAG |
| | NO: 75 | CTGGGTGAGGCAGGCCCCCGGCCAGGGCCTGGAGTGGATGGGCATCATCAAC |
| | | CCCATCGGCGGCAGCACCAGCTACGCCCAGAAGTTCCAGGGCAGGGTGACCA |
| | | TGACCAGGGACACCAGCACCAGCACCGTGTACATGGAGCTGAGCAGCCTGAG |
| | | GAGCGAGGACACCGCCGTGTACTACTGCGCCAGGGACCCCAGCGGCATCGCC |
| | | CTGGCCGGCCCCGCCAGCAGGGGCTACCAGGGCATGGACGTGTGGGGCCAGG |
| | | GCACCACCGTGACCGTGAGCAGCGCCAGCACCAAGGGCCCCAGCGTGTTCCC |
| | | CCTGGCCCCCAGCAGCAAGAGCACCAGCGGCGGCACCGCCGCCCTGGGCTGC |
| | | CTGGTGAAGGACTACTTCCCCGAGCCCGTGACCGTGAGCTGGAACAGCGGCG |
| | | CCCTGACCAGCGGCGTGCACACCTTCCCCGCCGTGCTGCAGAGCAGCGGCCT |
| | | GTACAGCCTGAGCAGCGTGGTGACCGTGCCCAGCAGCAGCCTGGGCACCCAG |
| | | ACCTACATCTGCAACGTGAACCACAAGCCCAGCAACACCAAGGTGGACAAGA |
| | | GGGTGGAGCCCAAGAGCTGCGAC +/− AAGACCCACACC (or |
| | | AAGACCCACCTG) +/− TGCCCCCCCTGCCCCGCC +/− |
| | | CCCGAGCTGCTGGGCGGCCCCAGCGTGTTCCTG |
| AL-001 | Light/ | GAGATCGTGATGACCCAGAGCCCCGCCACCCTGAGCGTGAGCCCCGGCGAGA |
| | SEQ ID | GGGCCACCCTGAGCTGCAGGGCCAGCCAGAGCGTGAGCAGCAACCTGGCCTG |
| | NO: 76 | GTACCAGCAGAAGCCCGGCCAGGCCCCCAGGCTGCTGATCTACGGCGCCAGC |
| | | ACCAGGGCCACCGGCATCCCCGCCAGGTTCAGCGGCAGCGGCAGCGGCACCG |
| | | AGTTCACCCTGACCATCAGCAGCCTGCAGAGCGAGGACTTCGCCGTGTACTA |
| | | CTGCCAGCAGGCCAGGCTGGGCCCCTGGACCTTCGGCGGCGGCACCAAGGTG |
| | | GAGATCAAGAGGACCGTGGCCGCCCCCAGCGTGTTCATCTTCCCCCCCAGCG |
| | | ACGAGCAGCTGAAGAGCGGCACCGCCAGCGTGGTGTGCCTGCTGAACAACTT |
| | | CTACCCCAGGGAGGCCAAGGTGCAGTGGAAGGTGGACAACGCCCTGCAGAGC |
| | | GGCAACAGCCAGGAGAGCGTGACCGAGCAGGACAGCAAGGACAGCACCTACA |
| | | GCCTGAGCAGCACCCTGACCCTGAGCAAGGCCGACTACGAGAAGCACAAGGT |
| | | GTACGCCTGCGAGGTGACCCACCAGGGCCTGAGCAGCCCCGTGACCAAGAGC |
| | | TTCAACAGGGGCGAGTGC |
| ABBV-8E12 | Heavy/ | GAGGTGAAGGTGGTGGAGAGCGGCGGCGGCCTGGTGCAGCCCGGCGGCAGCA |
| | SEQ ID | TGAAGCTGAGCTGCGTGGTGAGCGGCTTCACCTTCAGCAACTACTGGGTGAA |
| | NO: 77 | CTGGGTGAGGCAGGCCCCCGGCAAGGGCCTGGAGTGGGTGGCCCAGATCAGG |
| | | CTGAAGAGCGACAACTACGCCACCCACTACGAGGAGAGCGTGAAGGGCAGGT |
| | | TCACCATCAGCAGGGACGACAGCAAGAGCAGCGTGTACCTGCAGATGAACAA |
| | | CCTGAGGGCCGAGGACAGCGGCATCTACTACTGCACCAACTGGGAGGACTAC |
| | | TGGGGCCAGGGCACCACCGTGACCGTGAGCAGCGCCAGCACCAAGGGCCCCA |
| | | GCGTGTTCCCCCTGGCCCCCTGCAGCAGGAGCACCAGCGAGAGCACCGCCGC |
| | | CCTGGGCTGCCTGGTGAAGGACTACTTCCCCGAGCCCGTGACCGTGAGCTGG |
| | | AACAGCGGCGCCCTGACCAGCGGCGTGCACACCTTCCCCGCCGTGCTGCAGA |
| | | GCAGCGGCCTGTACAGCCTGAGCAGCGTGGTGACCGTGCCCAGCAGCAGCCT |
| | | GGGCACCAAGACCTACACCTGCAACGTGGACCACAAGCCCAGCAACACCAAG |
| | | GTGGACAAGAGGGTGGAGAGCAAGTAC +/− GGCCCCCCCTGCCCCCCCTG |
| | | CCCCGCC (GGCCCCCCCTGCCCCAGCTGCCCCGCC) +/− |
| | | CCCGAGTTCCTGGGCGGCCCCAGCGTGTTCCTG |
| ABBV-8E12 | Light/ | GACATCGTGCTGACCCAGAGCCCCGACAGCCTGGCCGTGAGCCTGGGCGAGA |
| | SEQ ID | GGGCCACCATCAGCTGCAGGGCCAGCCAGAGCGTGAGCACCAGCAGGTACAG |
| | NO: 78 | CTACATCCACTGGTACCAGCAGAAGCCCGGCCAGTTCCCCAAGCTGCTGATC |
| | | AAGTACGCCAGCAACCTGGAGAGCGGCGTGCCCAGCAGGTTCAGCGGCAGCG |
| | | GCAGCGGCACCGACTTCACCCTGAACATCCACCCCCTGGAGCCCGAGGACTT |
| | | CGCCACCTACTACTGCCACCACAGCTGGGAGATCCCCCTGACCTTCGGCCAG |
| | | GGCACCAAGCTGGAGATCAAGAGGACCGTGGCCGCCCCCAGCGTGTTCATCT |
| | | TCCCCCCCAGCGACGAGCAGCTGAAGAGCGGCACCGCCAGCGTGGTGTGCCT |
| | | GCTGAACAACTTCTACCCCAGGGAGGCCAAGGTGCAGTGGAAGGTGGACAAC |
| | | GCCCTGCAGAGCGGCAACAGCCAGGAGAGCGTGACCGAGCAGGACAGCAAGG |
| | | ACAGCACCTACAGCCTGAGCAGCACCCTGACCCTGAGCAAGGCCGACTACGA |
| | | GAAGCACAAGGTGTACGCCTGCGAGGTGACCCACCAGGGCCTGAGCAGCCCC |
| | | GTGACCAAGAGCTTCAACAGGGGCGAGTGC |
| UCB-0107 | Heavy/ | GAGGTGCAGCTGCAGGAGAGCGGCCCCGGCCTGGTGAAGCCCAGCGAGACCC |
| | SEQ ID | TGAGCCTGACCTGCACCGTGAGCGGCTTCAGCCTGACCAGCAACGACATCGC |
| | NO: 79 | CTGGATCAGGCAGCCCCCCGGCAAGGGCCTGGAGTGGATGGGCACCATCTGG |
| | | ACCGACGGCAGCACCAACTACAAC(GCC/ACC)GCCGTGCAGAGCAGGGTGA |
| | | CCATCAGCGTGGACACCAGCAAGAACCAGTTCAGCCTGAAGCTGAGCAGCGT |
| | | GACCGCCGCCGACACCGCCGTGTACTACTGCGCCAGGCACAGGCTGTACTAC |
| | | GGCGCCTTCGACTACTGGGGCCAGGGCACCATGGTGACCGTGAGCAGCGCCA |
| | | GCACCAAGGGCCCCAGCGTGTTCCCCCTGGCCCCCTGCAGCAGGAGCACCAG |
| | | CGAGAGCACCGCCGCCCTGGGCTGCCTGGTGAAGGACTACTTCCCCGAGCCC |
| | | GTGACCGTGAGCTGGAACAGCGGCGCCCTGACCAGCGGCGTGCACACCTTCC |
| | | CCGCCGTGCTGCAGAGCAGCGGCCTGTACAGCCTGAGCAGCGTGGTGACCGT |
| | | GCCCAGCAGCAGCCTGGGCACCAAGACCTACACCTGCAACGTGGACCACAAG |
| | | CCCAGCAACACCAAGGTGGACAAGAGGGTGGAGAGCAAGTAC +/− GGCCCC |
| | | CCCTGCCCCCCCTGCCCCGCC (GGCCCCCCCTGCCCCAGCTGCCCCGCC) |
| | | +/− CCCGAGTTCCTGGGCGGCCCCAGCGTGTTCCTG |
| UCB-0107 | Light/ | GACATCGTGATGACCCAGACCCCCCTGAGCCTGAGCGTGACCCCCGGCCAGC |
| | SEQ ID | CCGCCAGCATCAGCTGCAGGAGCAGCCAGAGCCTGGAGTACAGCGACGGCTA |
| | NO: 80 | CACCTACCTGGAGTGGTACCTGCAGAAGCCCGGCCAGAGCCCCCAGCTGCTG |
| | | ATCTACGAGGTGAGCAACAGGTTCAGCGGCGTGCCCGACAGGTTCAGCGGCA |
| | | GCGGCAGCGGCACCGACTTCACCCTGAAGATCAGCAGGGTGGAGGCCGAGGA |
| | | CGTGGGCGTGTACTACTGCTTCCAGGCCACCCACAACCCCTACACCTTCGGC |
| | | CAGGGCACCAAGCTGGAGATCAAGAGGACCGTGGCCGCCCCCAGCGTGTTCA |
| | | TCTTCCCCCCCAGCGACGAGCAGCTGAAGAGCGGCACCGCCAGCGTGGTGTG |
| | | CCTGCTGAACAACTTCTACCCCAGGGAGGCCAAGGTGCAGTGGAAGGTGGAC |
| | | AACGCCCTGCAGAGCGGCAACAGCCAGGAGAGCGTGACCGAGCAGGACAGCA |
| | | AGGACAGCACCTACAGCCTGAGCAGCACCCTGACCCTGAGCAAGGCCGACTA |
| | | CGAGAAGCACAAGGTGTACGCCTGCGAGGTGACCCACCAGGGCCTGAGCAGC |
| | | CCCGTGACCAAGAGCTTCAACAGGGGCGAGTGC |
| NI-105 | Heavy/ | CAGGTGCAGCTGGTGGAGAGCGGCGGCGGCGTGGTGCAGCCCGGCAGGAGCC |
| | SEQ ID | TGAGGGTGAGCTGCGCCGCCAGCGGCTTCACCTTCAGCAGCTACGACATGCA |
| | NO: 81 | CTGGGTGAGGCAGGCCCCCGGCAAGGGCCTGGAGTGGGTGGCCGTGATCTGG |
| | | TTCGACGGCAGCAACGAGTTCTACGCCGACAGCGTGAAGGGCAGGTTCACCA |
| | | TCAGCAGGGACAACAGCAAGAACACCCTGTTCCAGATGAACAGCCTGAGGGC |
| | | CGAGGACACCGCCGTGTACTACTGCGCCAGGGACCTGGGCGCCAGCGTGACC |
| | | ACCAGCAACGCCGAGAACTTCCACCACTGGGGCCAGGGCACCCTGGTGACCG |
| | | TGAGCAGCGCCAGCACCAAGGGCCCCAGCGTGTTCCCCCTGGCCCCCAGCAG |
| | | CAAGAGCACCAGCGGCGGCACCGCCGCCCTGGGCTGCCTGGTGAAGGACTAC |
| | | TTCCCCGAGCCCGTGACCGTGAGCTGGAACAGCGGCGCCCTGACCAGCGGCG |
| | | TGCACACCTTCCCCGCCGTGCTGCAGAGCAGCGGCCTGTACAGCCTGAGCAG |
| | | CGTGGTGACCGTGCCCAGCAGCAGCCTGGGCACCCAGACCTACATCTGCAAC |
| | | GTGAACCACAAGCCCAGCAACACCAAGGTGGACAAGAAGGTGGAGCCCAAGA |
| | | GCTGCGAC +/− AAGACCCACACC (or AAGACCCACCTG) +/− |
| | | TGCCCCCCCTGCCCCGCC +/− CCCGAGCTGGCCGGCGCCCCCAGC |
| | | GTGTTCCTG |
| NI-105 | Light/ | AGCTACGAGCTGACCCAGCCCCCCAGCGTGAGCGTGAGCCCCGGCCAGACCG |
| | SEQ ID | CCAGGATCACCTGCAGCGGCGACGCCCTGCCCAAGAGGTACGTGTACTGGTA |
| | NO: 82 | CCAGCAGAAGAGCGGCCAGGCCCCCGTGCTGGTGATCTACGAGGACAGCAAG |
| | | AGGCCCAGCGGCATCCCCGAGACCTTCAGCGGCAGCAGCAGCGGCACCATGG |
| | | CCACCCTGACCATCAGCGGCGCCCAGGTGGAGGACGAGGCCGACTACTACTG |
| | | CTACAGCACCGACAGCAACGGCCACCACTGGGTGTTCGGCGGCGGCACCAAG |
| | | CTGACCGTGCTGGGCCAGCCCAAGGCCGCCCCCAGCGTGACCCTGTTCCCCC |
| | | CCAGCAGCGAGGAGCTGCAGGCCAACAAGGCCACCCTGGTGTGCCTGATCAG |
| | | CGACTTCTACCCCGGCGCCGTGACCGTGGCCTGGAAGGCCGACAGCAGCCCC |
| | | GTGAAGGCCGGCGTGGAGACCACCACCCCCAGCAAGCAGAGCAACAACAAGT |
| | | ACGCCGCCAGCAGCTACCTGAGCCTGACCCCCGAGCAGTGGAAGAGCCACAG |
| | | GAGCTACAGCTGCCAGGTGACCCACGAGGGCAGCACCGTGGAGAAGACCGTG |
| | | GCCCCCACCTGCAGC |
| VX15/2503 | Heavy/ | CAGGTGCAGCTGGTGCAGAGCGGCGCCGAGGTGAAGAAGCCCGGCAGCAGCG |
| | SEQ ID | TGAAGGTGAGCTGCAAGGCCAGCGGCTACAGCTTCAGCGACTACTACATGCA |
| | NO: 83 | CTGGGTGAGGCAGGCCCCCGGCCAGGGCCTGGAGTGGATGGGCCAGATCAAC |
| | | CCCACCACCGGCGGCGCCAGCTACAACCAGAAGTTCAAGGGCAAGGCCACCA |
| | | TCACCGTGGACAAGAGCACCAGCACCGCCTACATGGAGCTGAGCAGCCTGAG |
| | | GAGCGAGGACACCGCCGTGTACTACTGCGCCAGGTACTACTACGGCAGGCAC |
| | | TTCGACGTGTGGGGCCAGGGCACCACCGTGACCGTGAGCAGCGCCAGCACCA |
| | | AGGGCCCCAGCGTGTTCCCCCTGGCCCCCTGCAGCAGGAGCACCAGCGAGAG |
| | | CACCGCCGCCCTGGGCTGCCTGGTGAAGGACTACTTCCCCGAGCCCGTGACC |
| | | GTGAGCTGGAACAGCGGCGCCCTGACCAGCGGCGTGCACACCTTCCCCGCCG |
| | | TGACCGTGAGCAGCGTGCTGCAGAGCAGCGGCCTGTACAGCCTGAGCAGCGT |
| | | GGTGACCGTGCCCAGCAGCAGCCTGGGCACCAAGACCTACACCTGCAACGTG |
| | | GACCACAAGCCCAGCAACACCAAGGTGGACAAGAGGGTGGAGAGCAAGTAC |
| | | +/− GGCCCCCCCTGCCCCCCCTGCCCCGCC |
| | | (GGCCCCCCCTGCCCCAGCTGCCCCGCC) +/− CCCGAGTTCCTGGGCG |
| | | GCCCCAGCGTGTTCCTG |
| VX15/2503 | Light/ | GACATCGTGATGACCCAGAGCCCCGACAGCCTGGCCGTGAGCCTGGGCGAGA |
| | SEQ ID | GGGCCACCATCAACTGCAAGGCCAGCCAGAGCGTGGACTACGACGGCGACAG |
| | NO: 84 | CTACATGAACTGGTACCAGCAGAAGCCCGGCCAGCCCCCCAAGCTGCTGATC |
| | | TACGCCGCCAGCAACCTGGAGAGCGGCGTGCCCGACAGGTTCAGCGGCAGCG |
| | | GCAGCGGCACCGACTTCACCCTGACCATCAGCAGCCTGCAGGCCGAGGACGT |
| | | GGCCGTGTACTACTGCCAGCAGAGCAACGAGGACCCCTACACCTTCGGCCAG |
| | | GGCACCAAGCTGGAGATCAAGTTCATCTTCCCCCCCAGCGACGAGCAGCTGA |
| | | AGAGCGGCACCGCCAGCGTGGTGTGCCTGCTGAACAACTTCTACCCCAGGGA |
| | | GGCCAAGGTGCAGTGGAAGGTGGACAACGCCCTGCAGAGCGGCAACAGCCAG |
| | | GAGAGCGTGACCGAGCAGGACAGCAAGGACAGCACCTACAGCCTGAGCAGCA |
| | | CCCTGACCCTGAGCAAGGCCGACTACGAGAAGCACAAGGTGTACGCCTGCGA |
| | | GGTGACCCACCAGGGCCTGAGCAGCCCCGTGACCAAGAGCTTCAACAGGGGC |
| | | GAGTGC |
| Prasinezumab | Heavy/ | GAGGTGCAGCTGGTGGAGAGCGGCGGCGGCCTGGTGCAGCCCGGCGGCAGCC |
| | SEQ ID | TGAGGCTGAGCTGCGCCGCCAGCGGCTTCACCTTCAGCAACTACGGCATGAG |
| | NO: 85 | CTGGGTGAGGCAGGCCCCCGGCAAGGGCCTGGAGTGGGTGGCCAGCATCAGC |
| | | AGCGGCGGCGGCAGCACCTACTACCCCGACAACGTGAAGGGCAGGTTCACCA |
| | | TCAGCAGGGACGACGCCAAGAACAGCCTGTACCTGCAGATGAACAGCCTGAG |
| | | GGCCGAGGACACCGCCGTGTACTACTGCGCCAGGGGCGGCGCCGGCATCGAC |
| | | TACTGGGGCCAGGGCACCCTGGTGACCGTGAGCAGCGCCAGCACCAAGGGCC |
| | | CCAGCGTGTTCCCCCTGGCCCCCAGCAGCAAGAGCACCAGCGGCGGCACCGC |
| | | CGCCCTGGGCTGCCTGGTGAAGGACTACTTCCCCGAGCCCGTGACCGTGAGC |
| | | TGGAACAGCGGCGCCCTGACCAGCGGCGTGCACACCTTCCCCGCCGTGCTGC |
| | | AGAGCAGCGGCCTGTACAGCCTGAGCAGCGTGGTGACCGTGCCCAGCAGCAG |
| | | CCTGGGCACCCAGACCTACATCTGCAACGTGAACCACAAGCCCAGCAACACC |
| | | AAGGTGGACAAGAGGGTGGAGCCCAAGAGCTGCGAC +/− AAGACCCACACC |
| | | (or AAGACCCACCTG) +/− TGCCCCCCCTGCCCCGCC +/− |
| | | CCCGAGCTGCTGGGCGGCCCCAGCGTGTTCCTG |
| Prasinezumab | Light/ | GACATCCAGATGACCCAGAGCCCCAGCAGCCTGAGCGCCAGCGTGGGCGACA |
| | SEQ ID | GGGTGACCATCACCTGCAAGAGCATCCAGACCCTGCTGTACAGCAGCAACCA |
| | NO: 86 | GAAGAACTACCTGGCCTGGTTCCAGCAGAAGCCCGGCAAGGCCCCCAAGCTG |
| | | CTGATCTACTGGGCCAGCATCAGGAAGAGCGGCGTGCCCAGCAGGTTCAGCG |
| | | GCAGCGGCAGCGGCACCGACTTCACCCTGACCATCAGCAGCCTGCAGCCCGA |
| | | GGACCTGGCCACCTACTACTGCCAGCAGTACTACAGCTACCCCCTGACCTTC |
| | | GGCGGCGGCACCAAGCTGGAGATCAAGAGGACCGTGGCCGCCCCCAGCGTGT |
| | | TCATCTTCCCCCCCAGCGACGAGCAGCTGAAGAGCGGCACCGCCAGCGTGGT |
| | | GTGCCTGCTGAACAACTTCTACCCCAGGGAGGCCAAGGTGCAGTGGAAGGTG |
| | | GACAACGCCCTGCAGAGCGGCAACAGCCAGGAGAGCGTGACCGAGCAGGACA |
| | | GCAAGGACAGCACCTACAGCCTGAGCAGCACCCTGACCCTGAGCAAGGCCGA |
| | | CTACGAGAAGCACAAGGTGTACGCCTGCGAGGTGACCCACCAGGGCCTGAGC |
| | | AGCCCCGTGACCAAGAGCTTCAACAGGGGCGAGTGC |
| NI-202 | Heavy/ | GAGGTGCAGCTGGTGGAGAGCGGCGCCGAGGTGAAGAAGCCCGGCGCCAGCG |
| | SEQ ID | TGAAGGTGAGCTGCAAGGCCAGCGGCTACACCTTCACCAACTACGCCATGCA |
| | NO: 87 | CTGGGTGAGGCAGGCCCCCGGCCAGAGGCTGGAGTGGATGGGCTGGATCAAC |
| | | GCCGGCAACGGCAAGAGGAAGTACAGCCAGAAGTTCCAGGACAGGGTGACCA |
| | | TCAACAGGGACACCAGCGCCAGCACCATCTACATGGAGCTGAGCAGCCTGGG |
| | | CAGCGAGGACACCGCCGTGTACTACTGCGCCAGGGAGGAGGACCACGCCGGC |
| | | AGCGGCAGCTACCTGAGCATGGACGTGTGGGGCCAGGGCACCCTGGTGACCG |
| | | TGAGCAGCGCCAGCACCAAGGGCCCCAGCGTGTTCCCCCTGGCCCCCAGCAG |
| | | CAAGAGCACCAGCGGCGGCACCGCCGCCCTGGGCTGCCTGGTGAAGGACTAC |
| | | TTCCCCGAGCCCGTGACCGTGAGCTGGAACAGCGGCGCCCTGACCAGCGGCG |
| | | TGCACACCTTCCCCGCCGTGCTGCAGAGCAGCGGCCTGTACAGCCTGAGCAG |
| | | CGTGGTGACCGTGCCCAGCAGCAGCCTGGGCACCCAGACCTACATCTGCAAC |
| | | GTGAACCACAAGCCCAGCAACACCAAGGTGGACAAGAGGGTGGAGCCCAAGA |
| | | GCTGCGAC +/− AAGACCCACACC (or AAGACCCACCTG) +/− |
| | | TGCCCCCCCTGCCCCGCC +/− CCCGAGCTGCTGGGCGGCCCCAGCGTGTT |
| | | CCTG |
| NI-202 | Light/ | GACATCCAGATGACCCAGAGCCCCAGCAGCCTGAGCGCCAGCGTGGGCGACA |
| | SEQ ID | GGGTGACCATCACCTGCAAGAGCATCCAGACCCTGCTGTACAGCAGCAACCA |
| | NO: 88 | GAAGAACTACCTGGCCTGGTTCCAGCAGAAGCCCGGCAAGGCCCCCAAGCTG |
| | | CTGATCTACTGGGCCAGCATCAGGAAGAGCGGCGTGCCCAGCAGGTTCAGCG |
| | | GCAGCGGCAGCGGCACCGACTTCACCCTGACCATCAGCAGCCTGCAGCCCGA |
| | | GGACCTGGCCACCTACTACTGCCAGCAGTACTACAGCTACCCCCTGACCTTC |
| | | GGCGGCGGCACCAAGCTGGAGATCAAGAGGACCGTGGCCGCCCCCAGCGTGT |
| | | TCATCTTCCCCCCCAGCGACGAGCAGCTGAAGAGCGGCACCGCCAGCGTGGT |
| | | GTGCCTGCTGAACAACTTCTACCCCAGGGAGGCCAAGGTGCAGTGGAAGGTG |
| | | GACAACGCCCTGCAGAGCGGCAACAGCCAGGAGAGCGTGACCGAGCAGGACA |
| | | GCAAGGACAGCACCTACAGCCTGAGCAGCACCCTGACCCTGAGCAAGGCCGA |
| | | CTACGAGAAGCACAAGGTGTACGCCTGCGAGGTGACCCACCAGGGCCTGAGC |
| | | AGCCCCGTGACCAAGAGCTTCAACAGGGGCGAGTGC |
| MEDI- | Heavy/ | GAGGTGCAGCTGCTGGAGAGCGGCGGCGGCCTGGTGCAGCCCGGCGGCAGCC |
| 1341/TAK 341 | SEQ ID | TGAGGCTGAGCTGCGCCGCCAGCGGCTTCACCTTCAGCAGCTACGCCATGAG |
| | NO: 89 | CTGGGTGAGGCAGGCCCCCGGCAAGGGCCTGGAGTGGGTGAGCAGCATCAGC |
| | | CACCTGGGCGGCAGCACCTACTACGCCGACAGCGTGAAGGGCAGGTTCACCA |
| | | TCAGCAGGGACAACAGCAAGAACACCCTGTACCTGCAGATGAACAGCCTGAG |
| | | GGCCGAGGACACCGCCGTGTACTACTGCGCCGGCGGCGCCAACCACGGCAAG |
| | | TACTACTACGGCATGGACAAGTGGGGCCAGGGCACCACCGTGACCGTGAGCA |
| | | GCGCCAGCACCAAGGGCCCCAGCGTGTTCCCCCTGGCCCCCAGCAGCAAGAG |
| | | CACCAGCGGCGGCACCGCCGCCCTGGGCTGCCTGGTGAAGGACTACTTCCCC |
| | | GAGCCCGTGACCGTGAGCTGGAACAGCGGCGCCCTGACCAGCGGCGTGCACA |
| | | CCTTCCCCGCCGTGCTGCAGAGCAGCGGCCTGTACAGCCTGAGCAGCGTGGT |
| | | GACCGTGCCCAGCAGCAGCCTGGGCACCCAGACCTACATCTGCAACGTGAAC |
| | | CACAAGCCCAGCAACACCAAGGTGGACAAGAGGGTGGAGCCCAAGAGCTGCG |
| | | AC +/− AAGACCCACACC (or AAGACCCACCTG) +/− |
| | | TGCCCCCCCTGCCCCGCC +/− CCCGAGTTCGAGGGCGGCCCCAGCG |
| | | TGTTCCTG |
| MEDI- | Light/ | CAGGCCGTGCTGACCCAGCCCGCCAGCCTGAGCGCCAGCCCCGGCGCCAGCG |
| 1341/TAK 341 | SEQ ID | CCAGCCTGACCTGCACCCTGAGGAGCGGCGCCCCCCTGCCCAAGTACAGGAT |
| | NO: 90 | CTACTGGTACCAGCAGAAGCCCGGCAGCCCCCCCCAGTACCTGCTGAGGTAC |
| | | AAGAGCGACGCCGACAAGCACCAGGGCAGCGGCGTGCCCAGCAGGTTCAGCG |
| | | GCAGCAAGGACGCCAGCGCCAACGCCGGCATCCTGCTGATCAGCGGCCTGCA |
| | | GAGCGAGGACGAGGCCGACTACTACTGCATGGTGTGGGACCACGGCGTGTGG |
| | | TACTTCGGCGGCGGCACCAAGCTGACCGTGCTGGGCCAGCCCAAGGCCGCCC |
| | | CCAGCGTGACCCTGTTCCCCCCCAGCAGCGAGGAGCTGCAGGCCAACAAGGC |
| | | CACCCTGGTGTGCCTGATCAGCGACTTCTACCCCGGCGCCGTGACCGTGGCC |
| | | TGGAAGGCCGACAGCAGCCCCGTGAAGGCCGGCGTGGAGACCACCACCCCCA |
| | | GCAAGCAGAGCAACAACAAGTACGCCGCCAGCAGCTACCTGAGCCTGACCCC |
| | | CGAGCAGTGGAAGAGCCACAGGAGCTACAGCTGCCAGGTGACCCACGAGGGC |
| | | AGCACCGTGGAGAAGACCGTGGCCCCCACCGAGTGCAGC |
| NI-204.10D12 | Heavy/ | GAGGTGCAGCTGGTGGAGAGCGGCGGCGACCTGGTGAGGCCCGGCGGCAGCC |
| | SEQ ID | TGAGGCTGAGCTGCGTGGCCAGCGGCTTCACCTTCAGCAACTACTGGATGCA |
| | NO: 91 | CTGGGTGAGGCAGGCCCCCGGCCAGAGGCCCGTGTGGGTGAGCAGGACCAAC |
| | | ACCGACGGCAGGAACACCGCCTACGCCGACTACGCCAAGGGCAGGTTCACCA |
| | | TCAGCAGGGACAACGCCAAGAGCACCCTGTACCTGCAGCTGAACAGCCTGAG |
| | | GGCCGAGGACACCGCCGTGTACTTCTGCGCCAGGCTGAGGAGGAACGTGGCC |
| | | GACCAGATCACCCACAACTACTACATGGACGTGTGGGGCAAGGGCACCCTGG |
| | | TGACCGTGAGCAGCGCCAGCACCAAGGGCCCCAGCGTGTTCCCCCTGGCCCC |
| | | CAGCAGCAAGAGCACCAGCGGCGGCACCGCCGCCCTGGGCTGCCTGGTGAAG |
| | | GACTACTTCCCCGAGCCCGTGACCGTGAGCTGGAACAGCGGCGCCCTGACCA |
| | | GCGGCGTGCACACCTTCCCCGCCGTGCTGCAGAGCAGCGGCCTGTACAGCCT |
| | | GAGCAGCGTGGTGACCGTGCCCAGCAGCAGCCTGGGCACCCAGACCTACATC |
| | | TGCAACGTGAACCACAAGCCCAGCAACACCAAGGTGGACAAGAAGGTGGAGC |
| | | CCAAGAGCTGCGAC +/− AAGACCCACACC (or AAGACCCACCTG) +/− |
| | | TGCCCCCCCTGCCCCGCC +/− CCCGAGGCCGCCGGCGGCCCCAGC |
| | | GTGTTCCTG |
| NI-204.10D12 | Light/ | GACATCCAGATGACCCAGAGCCCCAGCAGCCTGAGCGCCAGCGTGGGCGACA |
| | SEQ ID | GGGTGACCGCCTGCAGGGCCAGCCAGAGCGTGGGCACCTACCTGAACTGGTA |
| | NO: 92 | CCAGCAGAAGAGGGGCAAGGCCCCCAAGCTGCTGATCTTCGCCGCCAGCAGC |
| | | CTGCAGAGCGGCGTGCCCAGCAGGTTCAGCGGCAGCGGCAGCGGCACCGACT |
| | | TCACCCTGACCATCAGCAGCCTGCAGCCCGAGGACTTCGCCACCTACTACTG |
| | | CCAGCAGAGCTACAGCAGCCCCCCCACCTTCGGCCAGGGCACCAAGGTGGAG |
| | | ATCAAGAGGACCGTGGCCGCCCCCAGCGTGTTCATCTTCCCCCCCAGCGACG |
| | | AGCAGCTGAAGAGCGGCACCGCCAGCGTGGTGTGCCTGCTGAACAACTTCTA |
| | | CCCCAGGGAGGCCAAGGTGCAGTGGAAGGTGGACAACGCCCTGCAGAGCGGC |
| | | AACAGCCAGGAGAGCGTGACCGAGCAGGACAGCAAGGACAGCACCTACAGCC |
| | | TGAGCAGCACCCTGACCCTGAGCAAGGCCGACTACGAGAAGCACAAGGTGTA |
| | | CGCCTGCGAGGTGACCCACCAGGGCCTGAGCAGCCCCGTGACCAAGAGCTTC |
| | | AACAGGGGCGAGTGC |
| NI-204.12G7 | Heavy/ | CAGGTGCAGCTGGTGCAGAGCGGCGCCGAGGTGAAGAAGCCCGGCGCCAGCG |
| | SEQ ID | TGACCCTGAGCTGCAAGGCCAGCGGCTACACCTTCACCGCCTACTACATCCA |
| | NO: 93 | CTGGGTGAGGCAGGCCAGGGAGCAGGGCCTGGAGTGGATGGGCGTGATCAAC |
| | | CCCAGCACCGGCACCACCTTCTACGCCCAGAACTTCCCCGACAGGGTGAGCG |
| | | TGACCAGGGACACCAGCACCAGCACCGTGTTCATGGAGCTGCACAACCTGAA |
| | | GAGCGAGGACACCGCCGTGTACTACTGCGCCAGGGCCATCAGCGAGCACGGC |
| | | AGCGGCAGCTACAGCCCCTACTACTGGGGCCAGGGCACCCTGGTGACCGTGA |
| | | GCAGCGCCAGCACCAAGGGCCCCAGCGTGTTCCCCCTGGCCCCCAGCAGCAA |
| | | GAGCACCAGCGGCGGCACCGCCGCCCTGGGCTGCCTGGTGAAGGACTACTTC |
| | | CCCGAGCCCGTGACCGTGAGCTGGAACAGCGGCGCCCTGACCAGCGGCGTGC |
| | | ACACCTTCCCCGCCGTGCTGCAGAGCAGCGGCCTGTACAGCCTGAGCAGCGT |
| | | GGTGACCGTGCCCAGCAGCAGCCTGGGCACCCAGACCTACATCTGCAACGTG |
| | | AACCACAAGCCCAGCAACACCAAGGTGGACAAGAAGGTGGAGCCCAAGAGCT |
| | | GCGAC +/− AAGACCCACACC (or AAGACCCACCTG) +/− |
| | | TGCCCCCCCTGCCCCGCC +/− CCCGAGGCCGCCGGCGGCCCCAGCGT |
| | | GTTCCTG |
| NI-204.12G7 | Light/ | AGCTACGAGCTGACCCAGCCCCCCAGCGTGAGCGTGAGCCTGGGCCAGATGG |
| | SEQ ID | CCGCCATCACCTGCAGCGGCGAGGCCCTGCCCAAGAAGTACGGCTACTGGTA |
| | NO: 94 | CCAGCAGAAGCCCGGCCAGGTGCCCGTGCTGCTGATCTACAGGGACGTGGAG |
| | | AGGCCCAGCGGCGTGCCCGACAGGTTCAGCGGCAGCAGCAGCGGCACCATGG |
| | | TGACCCTGACCATCAGCGGCGTGCAGGCCGAGGACGAGGCCGACTACTACTG |
| | | CCTGAGCGCCGACAGCAGCGGCACCTGGGTGTTCGGCGGCGGCACCAAGCTG |
| | | ACCGTGCTG |
| Eptinezumab | Heavy/ | GAGGTGCAGCTGGTGGAGAGCGGCGGCGGCCTGGTGCAGCCCGGCGGCAGCC |
| | SEQ ID | TGAGGCTGAGCTGCGCCGTGAGCGGCATCGACCTGAGCGGCTACTACATGAA |
| | NO: 95 | CTGGGTGAGGCAGGCCCCCGGCAAGGGCCTGGAGTGGGTGGGCGTGATCGGC |
| | | ATCAACGGCGCCACCTACTACGCCAGCTGGGCCAAGGGCAGGTTCACCATCA |
| | | GCAGGGACAACAGCAAGACCACCGTGTACCTGCAGATGAACAGCCTGAGGGC |
| | | CGAGGACACCGCCGTGTACTTCTGCGCCAGGGGCGACATCTGGGGCCAGGGC |
| | | ACCCTGGTGACCGTGAGCAGCGCCAGCACCAAGGGCCCCAGCGTGTTCCCCC |
| | | TGGCCCCCAGCAGCAAGAGCACCAGCGGCGGCACCGCCGCCCTGGGCTGCCT |
| | | GGTGAAGGACTACTTCCCCGAGCCCGTGACCGTGAGCTGGAACAGCGGCGCC |
| | | CTGACCAGCGGCGTGCACACCTTCCCCGCCGTGCTGCAGAGCAGCGGCCTGT |
| | | ACAGCCTGAGCAGCGTGGTGACCGTGCCCAGCAGCAGCCTGGGCACCCAGAC |
| | | CTACATCTGCAACGTGAACCACAAGCCCAGCAACACCAAGGTGGACGCCAGG |
| | | GTGGAGCCCAAGAGCTGCGAC +/− AAGACCCACACC (or |
| | | AAGACCCACCTG) +/− TGCCCCCCCTGCCCCGCC +/− |
| | | CCCGAGCTGCTGGGCGGCCCCAGCGTGACCCTG |
| Eptinezumab | Light/ | CAGGTGCTGACCCAGAGCCCCAGCAGCCTGAGCGCCAGCGTGGGCGACAGGG |
| | SEQ ID | TGACCATCAACTGCCAGGCCAGCCAGAGCGTGTACCACAACACCTACCTGGC |
| | NO: 96 | CTGGTACCAGCAGAAGCCCGGCAAGGTGCCCAAGCAGCTGATCTACGACGCC |
| | | AGCACCCTGGCCAGCGGCGTGCCCAGCAGGTTCAGCGGCAGCGGCAGCGGCA |
| | | CCGACTTCACCCTGACCATCAGCAGCCTGCAGCCCGAGGACGTGGCCACCTA |
| | | CTACTGCCTGGGCAGCTACGACTGCACCAACGGCGACTGCTTCGTGTTCGGC |
| | | GGCGGCACCAAGGTGGAGATCAAGAGGACCGTGGCCGCCCCCAGCGTGTTCA |
| | | TCTTCCCCCCCAGCGACGAGCAGCTGAAGAGCGGCACCGCCAGCGTGGTGTG |
| | | CCTGCTGAACAACTTCTACCCCAGGGAGGCCAAGGTGCAGTGGAAGGTGGAC |
| | | AACGCCCTGCAGAGCGGCAACAGCCAGGAGAGCGTGACCGAGCAGGACAGCA |
| | | AGGACAGCACCTACAGCCTGAGCAGCACCCTGACCCTGAGCAAGGCCGACTA |
| | | CGAGAAGCACAAGGTGTACGCCTGCGAGGTGACCCACCAGGGCCTGAGCAGC |
| | | CCCGTGACCAAGAGCTTCAACAGGGGCGAGTGC |
| Fremanezumab | Heavy/ | GAGGTGCAGCTGGTGGAGAGCGGCGGCGGCCTGGTGCAGCCCGGCGGCAGCC |
| | SEQ ID | TGAGGCTGAGCTGCGCCGCCAGCGGCTTCACCTTCAGCAACTACTGGATCAG |
| | NO: 97 | CTGGGTGAGGCAGGCCCCCGGCAAGGGCCTGGAGTGGGTGGCCGAGATCAGG |
| | | AGCGAGAGCGACGCCAGCGCCACCCACTACGCCGAGGCCGTGAAGGGCAGGT |
| | | TCACCATCAGCAGGGACAACGCCAAGAACAGCCTGTACCTGCAGATGAACAG |
| | | CCTGAGGGCCGAGGACACCGCCGTGTACTACTGCCTGGCCTACTTCGACTAC |
| | | GGCCTGGCCATCCAGAACTACTGGGGCCAGGGCACCCTGGTGACCGTGAGCA |
| | | GCGCCAGCACCAAGGGCCCCAGCGTGTTCCCCCTGGCCCCCTGCAGCAGGAG |
| | | CACCAGCGAGAGCACCGCCGCCCTGGGCTGCCTGGTGAAGGACTACTTCCCC |
| | | GAGCCCGTGACCGTGAGCTGGAACAGCGGCGCCCTGACCAGCGGCGTGCACA |
| | | CCTTCCCCGCCGTGCTGCAGAGCAGCGGCCTGTACAGCCTGAGCAGCGTGGT |
| | | GACCGTGCCCAGCAGCAACTTCGGCACCCAGACCTACACCTGCAACGTGGAC |
| | | CACAAGCCCAGCAACACCAAGGTGGACAAGACCGTGGAGAGGAAGTGCTGCG |
| | | TGGAG +/− TGCCCCCCCTGCCCCGCC +/− CCCCCCGTGGCCGGC |
| Fremanezumab | Light/ | GAGATCGTGCTGACCCAGAGCCCCGCCACCCTGAGCCTGAGCCCCGGCGAGA |
| | SEQ ID | GGGCCACCCTGAGCTGCAAGGCCAGCAAGAGGGTGACCACCTACGTGAGCTG |
| | NO: 98 | GTACCAGCAGAAGCCCGGCCAGGCCCCCAGGCTGCTGATCTACGGCGCCAGC |
| | | AACAGGTACCTGGGCATCCCCGCCAGGTTCAGCGGCAGCGGCAGCGGCACCG |
| | | ACTTCACCCTGACCATCAGCAGCCTGGAGCCCGAGGACTTCGCCGTGTACTA |
| | | CTGCAGCCAGAGCTACAACTACCCCTACACCTTCGGCCAGGGCACCAAGCTG |
| | | GAGATCAAGAGGACCGTGGCCGCCCCCAGCGTGTTCATCTTCCCCCCCAGCG |
| | | ACGAGCAGCTGAAGAGCGGCACCGCCAGCGTGGTGTGCCTGCTGAACAACTT |
| | | CTACCCCAGGGAGGCCAAGGTGCAGTGGAAGGTGGACAACGCCCTGCAGAGC |
| | | GGCAACAGCCAGGAGAGCGTGACCGAGCAGGACAGCAAGGACAGCACCTACA |
| | | GCCTGAGCAGCACCCTGACCCTGAGCAAGGCCGACTACGAGAAGCACAAGGT |
| | | GTACGCCTGCGAGGTGACCCACCAGGGCCTGAGCAGCCCCGTGACCAAGAGC |
| | | TTCAACAGGGGCGAGTGC |
| Galcanezumab | Heavy/ | CAGGTGCAGCTGGTGCAGAGCGGCGCCGAGGTGAAGAAGCCCGGCAGCAGCG |
| | SEQ ID | TGAAGGTGAGCTGCAAGGCCAGCGGCTACACCTTCGGCAACTACTGGATGCA |
| | NO: 99 | GTGGGTGAGGCAGGCCCCCGGCCAGGGCCTGGAGTGGATGGGCGCCATCTAC |
| | | GAGGGCACCGGCAAGACCGTGTACATCCAGAAGTTCGCCGACAGGGTGACCA |
| | | TCACCGCCGACAAGAGCACCAGCACCGCCTACATGGAGCTGAGCAGCCTGAG |
| | | GAGCGAGGACACCGCCGTGTACTACTGCGCCAGGCTGAGCGACTACGTGAGC |
| | | GGCTTCGGCTACTGGGGCCAGGGCACCACCGTGACCGTGAGCAGCGCCAGCA |
| | | CCAAGGGCCCCAGCGTGTTCCCCCTGGCCCCCTGCAGCAGGAGCACCAGCGA |
| | | GAGCACCGCCGCCCTGGGCTGCCTGGTGAAGGACTACTTCCCCGAGCCCGTG |
| | | ACCGTGAGCTGGAACAGCGGCGCCCTGACCAGCGGCGTGCACACCTTCCCCG |
| | | CCGTGCTGCAGAGCAGCGGCCTGTACAGCCTGAGCAGCGTGGTGACCGTGCC |
| | | CAGCAGCAGCCTGGGCACCAAGACCTACACCTGCAACGTGGACCACAAGCCC |
| | | AGCAACACCAAGGTGGACAAGAGGGTGGAGAGCAAGTAC +/− GGCCCCCCC |
| | | TGCCCCCCCTGCCCCGCC (GGCCCCCCCTGCCCCAGCTGCCCCGCC) +/− |
| | | CCCGAGGCCGCCGGCGGCCCCAGCGTGTTCCTG |
| Galcanezumab | Light/ | GACATCCAGATGACCCAGAGCCCCAGCAGCCTGAGCGCCAGCGTGGGCGACA |
| | SEQ ID | GGGTGACCATCACCTGCAGGGCCAGCAAGGACATCAGCAAGTACCTGAACTG |
| | NO: 100 | GTACCAGCAGAAGCCCGGCAAGGCCCCCAAGCTGCTGATCTACTACACCAGC |
| | | GGCTACCACAGCGGCGTGCCCAGCAGGTTCAGCGGCAGCGGCAGCGGCACCG |
| | | ACTTCACCCTGACCATCAGCAGCCTGCAGCCCGAGGACTTCGCCACCTACTA |
| | | CTGCCAGCAGGGCGACGCCCTGCCCCCCACCTTCGGCGGCGGCACCAAGGTG |
| | | GAGATCAAGAGGACCGTGGCCGCCCCCAGCGTGTTCATCTTCCCCCCCAGCG |
| | | ACGAGCAGCTGAAGAGCGGCACCGCCAGCGTGGTGTGCCTGCTGAACAACTT |
| | | CTACCCCAGGGAGGCCAAGGTGCAGTGGAAGGTGGACAACGCCCTGCAGAGC |
| | | GGCAACAGCCAGGAGAGCGTGACCGAGCAGGACAGCAAGGACAGCACCTACA |
| | | GCCTGAGCAGCACCCTGACCCTGAGCAAGGCCGACTACGAGAAGCACAAGGT |
| | | GTACGCCTGCGAGGTGACCCACCAGGGCCTGAGCAGCCCCGTGACCAAGAGC |
| | | TTCAACAGGGGCGAGTGC |
| Sevacizumab | Heavy/ | GAGGTGCAGCTGGTGGAGAGCGGCGGCGGCCTGGTGAAGCCCGGCGGCAGCC |
| | SEQ ID | TGAGGCTGAGCTGCGCCGCCAGCGGCTTCAGCTTCAGCAACAACGACGTGAT |
| | NO: 101 | GTGCTGGGTGAGGCAGGCCCCCGGCAAGGGCCTGGAGTGGATCGGCTGCATC |
| | | ATGACCACCGACGTGGTGACCGAGTACGCCAACTGGGCCAAGAGCAGGTTCA |
| | | CCGTGAGCAGGGACAGCGCCAAGAACAGCGTGTACCTGCAGATGAACAGCCT |
| | | GAGGGCCGAGGACACCGCCGTGTACTTCTGCGCCAGGGACAGCGTGGGCAGC |
| | | CCCCTGATGAGCTTCGACCTGTGGGGCCCCGGCACCCTGGTGACCGTGAGCA |
| | | GCGCCAGCACCAAGGGCCCCAGCGTGTTCCCCCTGGCCCCCAGCAGCAAGAG |
| | | CACCAGCGGCGGCACCGCCGCCCTGGGCTGCCTGGTGAAGGACTACTTCCCC |
| | | GAGCCCGTGACCGTGAGCTGGAACAGCGGCGCCCTGACCAGCGGCGTGCACA |
| | | CCTTCCCCGCCGTGCTGCAGAGCAGCGGCCTGTACAGCCTGAGCAGCGTGGT |
| | | GACCGTGCCCAGCAGCAGCCTGGGCACCCAGACCTACATCTGCAACGTGAAC |
| | | CACAAGCCCAGCAACACCAAGGTGGACAAGAAGGTGGAGCCCAAGAGCTGCG |
| | | AC +/− AAGACCCACACC (or AAGACCCACCTG) +/− |
| | | TGCCCCCCCTGCCCCGCC +/− CCCGAGCTGCTGGGCGGCCCCAGCGTGTT |
| | | CCTG |
| Sevacizumab | Light/ | GACATCCAGATGACCCAGAGCCCCAGCAGCCTGAGCGCCAGCGTGGGCGACA |
| | SEQ ID | GGGTGACCATCAACTGCCAGGCCAGCCAGAGCATCTACAACAACAACGAGCT |
| | NO: 102 | GAGCTGGTACCAGCAGAAGCCCGGCAAGCCCCCCAAGCTGCTGATCTACAGG |
| | | GCCAGCACCCTGGCCAGCGGCGTGCCCAGCAGGTTCAGCGGCAGCGGCAGCG |
| | | GCACCGACTTCACCCTGACCATCAGCAGCCTGCAGCCCGAGGACGTGGCCAC |
| | | CTACTACTGCGGCGGCTACAAGAGCTACAGCAACGACGGCAACGGCTTCGGC |
| | | GGCGGCACCAAGGTGGAGATCAAGAGGACCGTGGCCGCCCCCAGCGTGTTCA |
| | | TCTTCCCCCCCAGCGACGAGCAGCTGAAGAGCGGCACCGCCAGCGTGGTGTG |
| | | CCTGCTGAACAACTTCTACCCCAGGGAGGCCAAGGTGCAGTGGAAGGTGGAC |
| | | AACGCCCTGCAGAGCGGCAACAGCCAGGAGAGCGTGACCGAGCAGGACAGCA |
| | | AGGACAGCACCTACAGCCTGAGCAGCACCCTGACCCTGAGCAAGGCCGACTA |
| | | CGAGAAGCACAAGGTGTACGCCTGCGAGGTGACCCACCAGGGCCTGAGCAGC |
| | | CCCGTGACCAAGAGCTTCAACAGGGGCGAGTGC |
| LKA-651/NVS2 | Heavy/ | GAGGTGCAGCTGGTGCAGAGCGGCGCCGAGGTGAAGAAGCCCGGCGAGAGCC |
| | SEQ ID | TGAAGATCAGCTGCAAGGGCAGCGGCTACAGCTTCACCAGCTACTGGATCGG |
| | NO: 103 | CTGGGTGAGGCAGATGCCCGGCAAGGGCCTGGAGTGGATGGGCTGGATCGAC |
| | | CCCTACAGGAGCGAGATCAGGTACAGCCCCAGCTTCCAGGGCCAGGTGACCA |
| | | TCAGCGCCGACAAGAGCATCAGCACCGCCTACCTGCAGTGGAGCAGCCTGAA |
| | | GGCCAGCGACACCGCCATGTACTACTGCGCCAGGGTGAGCAGCGAGCCCTTC |
| | | GACAGCTGGGGCCAGGGCACCCTGGTGACCGTGAGCAGCGCCAGCACCAAGG |
| | | GCCCCAGCGTGTTCCCCCTGGCCCCCAGCAGCAAGAGCACCAGCGGCGGCAC |
| | | CGCCGCCCTGGGCTGCCTGGTGAAGGACTACTTCCCCGAGCCCGTGACCGTG |
| | | AGCTGGAACAGCGGCGCCCTGACCAGCGGCGTGCACACCTTCCCCGCCGTGC |
| | | TGCAGAGCAGCGGCCTGTACAGCCTGAGCAGCGTGGTGACCGTGCCCAGCAG |
| | | CAGCCTGGGCACCCAGACCTACATCTGCAACGTGAACCACAAGCCCAGCAAC |
| | | ACCAAGGTGGACAAGAGGGTGGAGCCCAAGAGCTGCGAC +/− AAGACCCA |
| | | CACC (or AAGACCCACCTG) +/− TGCCCCCCCTGCCCCGCC +/− |
| | | CCCGAGCTGCTGGGCGGCCCCAGCGTGTTCCTG |
| LKA-651/NVS2 | Light/ | AGCTACGTGCTGACCCAGCCCCCCAGCGTGAGCGTGGCCCCCGGCAAGACCG |
| | SEQ ID | CCAGGATCACCTGCAGCGGCGACAAGCTGGGCGACCACTACGCCTACTGGTA |
| | NO: 104 | CCAGCAGAAGCCCGGCCAGGCCCCCGTGCTGGTGATCTACGACGACAGCAAG |
| | | AGGCCCAGCGGCATCCCCGAGAGGTTCAGCGGCAGCAACAGCGGCAACACCG |
| | | CCACCCTGACCATCAGCAGGGTGGAGGCCGGCGACGAGGCCGACTACTACTG |
| | | CGCCACCTGGACCTTCGAGGGCGACTACGTGTTCGGCGGCGGCACCAAGCTG |
| | | ACCGTGCTGGGCCAGCCCAAGGCCGCCCCCAGCGTGACCCTGTTCCCCCCCA |
| | | GCAGCGAGGAGCTGCAGGCCAACAAGGCCACCCTGGTGTGCCTGATCAGCGA |
| | | CTTCTACCCCGGCGCCGTGACCGTGGCCTGGAAGGCCGACAGCAGCCCCGTG |
| | | AAGGCCGGCGTGGAGACCACCACCCCCAGCAAGCAGAGCAACAACAAGTACG |
| | | CCGCCAGCAGCTACCTGAGCCTGACCCCCGAGCAGTGGAAGAGCCACAGGAG |
| | | CTACAGCTGCCAGGTGACCCACGAGGGCAGCACCGTGGAGAAGACCGTGGCC |
| | | CCCACCGAGTGCAGC |
| LKA-651/NVS3 | Heavy/ | CAGGTGCAGCTGCAGCAGAGCGGCCCCGGCCTGGTGAAGCCCAGCCAGACCC |
| | SEQ ID | TGAGCCTGACCTGCGCCATCAGCGGCGACAGCGTGAGCAGCAACACCGCCGC |
| | NO: 105 | CTGGAACTGGATCAGGCAGAGCCCCAGCAGGGGCCTGGAGTGGCTGGGCGTG |
| | | ATCTACTACAGGAGCAAGTGGTACAACGACTACGCCGTGAGCGTGAAGAGCA |
| | | GGATCACCATCAACCCCGACACCAGCAAGAACCAGTTCAGCCTGCAGCTGAA |
| | | CAGCGTGACCCCCGAGGACACCGCCGTGTACTACTGCGCCAGGAGCGTGCCC |
| | | GGCGGCGACCCCGGCCTGGAGCACGCCTTCGCCTACTGGGGCAGGGGCACCC |
| | | TGGTGACCGTGAGCAGCGCCAGCACCAAGGGCCCCAGCGTGTTCCCCCTGGC |
| | | CCCCAGCAGCAAGAGCACCAGCGGCGGCACCGCCGCCCTGGGCTGCCTGGTG |
| | | AAGGACTACTTCCCCGAGCCCGTGACCGTGAGCTGGAACAGCGGCGCCCTGA |
| | | CCAGCGGCGTGCACACCTTCCCCGCCGTGCTGCAGAGCAGCGGCCTGTACAG |
| | | CCTGAGCAGCGTGGTGACCGTGCCCAGCAGCAGCCTGGGCACCCAGACCTAC |
| | | ATCTGCAACGTGAACCACAAGCCCAGCAACACCAAGGTGGACAAGAGGGTGG |
| | | AGCCCAAGAGCTGCGAC +/− AAGACCCACACC (or AAGACCCACCTG) |
| | | +/− TGCCCCCCCTGCCCCGCC +/− CCCGAGCTGCTGGGCGGCCCCAG |
| | | CGTGTTCCTG |
| LKA-651/NVS3 | Light/ | AGCTACGTGCTGACCCAGCCCCCCAGCGTGAGCGTGGCCCCCGGCAAGACCG |
| | SEQ ID | CCAGGATCACCTGCAGCGGCGACAACCTGGGCACCTACTACGTGGAGTGGTA |
| | NO: 106 | CCAGCAGAAGCCCGGCCAGGCCCCCGTGCTGGTGATCTACGACGACAGCGAC |
| | | AGGCCCAGCGGCATCCCCGAGAGGTTCAGCGGCAGCAACAGCGGCAACACCG |
| | | CCACCCTGACCATCAGCAGGGTGGAGGCCGGCGACGAGGCCGACTACTACTG |
| | | CGCCAGCTTCGCCAGCTGGAGCGACAGCGTGTTCGGCGGCGGCACCAAGCTG |
| | | ACCGTGCTGGGCCAGCCCAAGGCCGCCCCCAGCGTGACCCTGTTCCCCCCCA |
| | | GCAGCGAGGAGCTGCAGGCCAACAAGGCCACCCTGGTGTGCCTGATCAGCGA |
| | | CTTCTACCCCGGCGCCGTGACCGTGGCCTGGAAGGCCGACAGCAGCCCCGTG |
| | | AAGGCCGGCGTGGAGACCACCACCCCCAGCAAGCAGAGCAACAACAAGTACG |
| | | CCGCCAGCAGCTACCTGAGCCTGACCCCCGAGCAGTGGAAGAGCCACAGGAG |
| | | CTACAGCTGCCAGGTGACCCACGAGGGCAGCACCGTGGAGAAGACCGTGGCC |
| | | CCCACCGAGTGCAGC |
| Ascrinvacumab | Heavy/ | ACCTGCACCGTGAGCGGCGGCAGCATCAGCAGCGGCGAGTACTACTGGAACT |
| | SEQ ID | GGATCAGGCAGCACCCCGGCAAGGGCCTGGAGTGGATCGGCTACATCTACTA |
| | NO: 107 | CAGCGGCAGCACCTACTACAACCCCAGCCTGAAGAGCAGGGTGACCATCAGC |
| | | GTGGACACCAGCAAGAACCAGTTCAGCCTGAAGCTGAGCAGCGTGACCGCCG |
| | | CCGACACCGCCGTGTACTACTGCGCCAGGGAGAGCGTGGCCGGCTTCGACTA |
| | | CTGGGGCCAGGGCACCCTGGTGACCGTGAGCAGCGCCAGCACCAAGGGCCCC |
| | | AGCGTGTTCCCCCTGGCCCCCTGCAGCAGGAGCACCAGCGAGAGCACCGCCG |
| | | CCCTGGGCTGCCTGGTGAAGGACTACTTCCCCGAGCCCGTGACCGTGAGCTG |
| | | GAACAGCGGCGCCCTGACCAGCGGCGTGCACACCTTCCCCGCCGTGCTGCAG |
| | | AGCAGCGGCCTGTACAGCCTGAGCAGCGTGGTGACCGTGCCCAGCAGCAACT |
| | | TCGGCACCCAGACCTACACCTGCAACGTGGACCACAAGCCCAGCAACACCAA |
| | | GGTGGACAAGACCGTGGAGAGGAAGTGCTGCGTGGAG +/− |
| | | TGCCCCCCCTGCCCCGCC +/− CCCCCCGTGGCCGGC |
| Ascrinvacumab | Light/ | GAGATCGTGCTGACCCAGAGCCCCGGCACCCTGAGCCTGAGCCCCGGCGAGA |
| | SEQ ID | GGGCCACCCTGAGCTGCAGGGCCAGCCAGAGCGTGAGCAGCAGCTACCTGGC |
| | NO: 108 | CTGGTACCAGCAGAAGCCCGGCCAGGCCCCCAGGCTGCTGATCTACGGCACC |
| | | AGCAGCAGGGCCACCGGCATCCCCGACAGGTTCAGCGGCAGCGGCAGCGGCA |
| | | CCGACTTCACCCTGACCATCAGCAGGCTGGAGCCCGAGGACTTCGCCGTGTA |
| | | CTACTGCCAGCAGTACGGCAGCAGCCCCATCACCTTCGGCCAGGGCACCAGG |
| | | CTGGAGATCAAGAGGACCGTGGCCGCCCCCAGCGTGTTCATCTTCCCCCCCA |
| | | GCGACGAGCAGCTGAAGAGCGGCACCGCCAGCGTGGTGTGCCTGCTGAACAA |
| | | CTTCTACCCCAGGGAGGCCAAGGTGCAGTGGAAGGTGGACAACGCCCTGCAG |
| | | AGCGGCAACAGCCAGGAGAGCGTGACCGAGCAGGACAGCAAGGACAGCACCT |
| | | ACAGCCTGAGCAGCACCCTGACCCTGAGCAAGGCCGACTACGAGAAGCACAA |
| | | GGTGTACGCCTGCGAGGTGACCCACCAGGGCCTGAGCAGCCCCGTGACCAAG |
| | | AGCTTCAACAGGGGCGAGTGC |
| Tesidolumab | Heavy/ | GAGGTGCAGCTGGTGCAGAGCGGCGCCGAGGTGAAGAAGCCCGGCAGCAGCG |
| | SEQ ID | TGAAGGTGAGCTGCAAGGCCAGCGGCGGCACCTTCAGCAGCTACGCCATCAG |
| | NO: 109 | CTGGGTGAGGCAGGCCCCCGGCCAGGGCCTGGAGTGGATGGGCGGCATCGGC |
| | | CCCTTCTTCGGCACCGCCAACTACGCCCAGAAGTTCCAGGGCAGGGTGACCA |
| | | TCACCGCCGACGAGAGCACCAGCACCGCCTACATGGAGCTGAGCAGCCTGAG |
| | | GAGCGAGGACACCGCCGTGTACTACTGCGCCAGGGACACCCCCTACTTCGAC |
| | | TACTGGGGCCAGGGCACCCTGGTGACCGTGAGCAGCGCCAGCACCAAGGGCC |
| | | CCAGCGTGTTCCCCCTGGCCCCCAGCAGCAAGAGCACCAGCGGCGGCACCGC |
| | | CGCCCTGGGCTGCCTGGTGAAGGACTACTTCCCCGAGCCCGTGACCGTGAGC |
| | | TGGAACAGCGGCGCCCTGACCAGCGGCGTGCACACCTTCCCCGCCGTGCTGC |
| | | AGAGCAGCGGCCTGTACAGCCTGAGCAGCGTGGTGACCGTGCCCAGCAGCAG |
| | | CCTGGGCACCCAGACCTACATCTGCAACGTGAACCACAAGCCCAGCAACACC |
| | | AAGGTGGACAAGAGGGTGGAGCCCAAGAGCTGCGAC +/− AAGACCCACACC |
| | | (or AAGACCCACCTG) +/− TGCCCCCCCTGCCCCGCC +/− |
| | | CCCGAGGCCGCCGGCGGCCCCAGCGTGTTCCTG |
| Tesidolumab | Light/ | AGCTACGAGCTGACCCAGCCCCTGAGCGTGAGCGTGGCCCTGGGCCAGACCG |
| | SEQ ID | CCAGGATCACCTGCAGCGGCGACAGCATCCCCAACTACTACGTGTACTGGTA |
| | NO: 110 | CCAGCAGAAGCCCGGCCAGGCCCCCGTGCTGGTGATCTACGACGACAGCAAC |
| | | AGGCCCAGCGGCATCCCCGAGAGGTTCAGCGGCAGCAACAGCGGCAACACCG |
| | | CCACCCTGACCATCAGCAGGGCCCAGGCCGGCGACGAGGCCGACTACTACTG |
| | | CCAGAGCTTCGACAGCAGCCTGAACGCCGAGGTGTTCGGCGGCGGCACCAAG |
| | | CTGACCGTGCTGGGCCAGCCCAAGGCCGCCCCCAGCGTGACCCTGTTCCCCC |
| | | CCAGCAGCGAGGAGCTGCAGGCCAACAAGGCCACCCTGGTGTGCCTGATCAG |
| | | CGACTTCTACCCCGGCGCCGTGACCGTGGCCTGGAAGGCCGACAGCAGCCCC |
| | | GTGAAGGCCGGCGTGGAGACCACCACCCCCAGCAAGCAGAGCAACAACAAGT |
| | | ACGCCGCCAGCAGCTACCTGAGCCTGACCCCCGAGCAGTGGAAGAGCCACAG |
| | | GAGCTACAGCTGCCAGGTGACCCACGAGGGCAGCACCGTGGAGAAGACCGTG |
| | | GCCCCCACCGAGTGCAGC |
| Carotuximab | Heavy/ | GAGGTGAAGCTGGAGGAGAGCGGCGGCGGCCTGGTGCAGCCCGGCGGCAGCA |
| | SEQ ID | TGAAGCTGAGCTGCGCCGCCAGCGGCTTCACCTTCAGCGACGCCTGGATGGA |
| | NO: 111 | CTGGGTGAGGCAGAGCCCCGAGAAGGGCCTGGAGTGGGTGGCCGAGATCAGG |
| | | AGCAAGGCCAGCAACCACGCCACCTACTACGCCGAGAGCGTGAAGGGCAGGT |
| | | TCACCATCAGCAGGGACGACAGCAAGAGCAGCGTGTACCTGCAGATGAACAG |
| | | CCTGAGGGCCGAGGACACCGGCATCTACTACTGCACCAGGTGGAGGAGGTTC |
| | | TTCGACAGCTGGGGCCAGGGCACCACCCTGACCGTGAGCAGCGCCAGCACCA |
| | | AGGGCCCCAGCGTGTTCCCCCTGGCCCCCAGCAGCAAGAGCACCAGCGGCGG |
| | | CACCGCCGCCCTGGGCTGCCTGGTGAAGGACTACTTCCCCGAGCCCGTGACC |
| | | GTGAGCTGGAACAGCGGCGCCCTGACCAGCGGCGTGCACACCTTCCCCGCCG |
| | | TGCTGCAGAGCAGCGGCCTGTACAGCCTGAGCAGCGTGGTGACCGTGCCCAG |
| | | CAGCAGCCTGGGCACCCAGACCTACATCTGCAACGTGAACCACAAGCCCAGC |
| | | AACACCAAGGTGGACAAGAAGGTGGAGCCCAAGAGCTGCGAC +/− |
| | | AAGACCCACACC (or AAGACCCACCTG) +/− |
| | | TGCCCCCCCTGCCCCGCC +/− CCCGAGCTGCTGGGCGGCCCCAGCGTGTTC |
| | | CTG |
| Carotuximab | Light/ | CAGATCGTGCTGAGCCAGAGCCCCGCCATCCTGAGCGCCAGCCCCGGCGAGA |
| | SEQ ID | AGGTGACCATGACCTGCAGGGCCAGCAGCAGCGTGAGCTACATGCACTGGTA |
| | NO: 112 | CCAGCAGAAGCCCGGCAGCAGCCCCAAGCCCTGGATCTACGCCACCAGCAAC |
| | | CTGGCCAGCGGCGTGCCCGTGAGGTTCAGCGGCAGCGGCAGCGGCACCAGCT |
| | | ACAGCCTGACCATCAGCAGGGTGGAGGCCGAGGACGCCGCCACCTACTACTG |
| | | CCAGCAGTGGAGCAGCAACCCCCTGACCTTCGGCGCCGGCACCAAGCTGGAG |
| | | CTGAAGAGGACCGTGGCCGCCCCCAGCGTGTTCATCTTCCCCCCCAGCGACG |
| | | AGCAGCTGAAGAGCGGCACCGCCAGCGTGGTGTGCCTGCTGAACAACTTCTA |
| | | CCCCAGGGAGGCCAAGGTGCAGTGGAAGGTGGACAACGCCCTGCAGAGCGGC |
| | | AACAGCCAGGAGAGCGTGACCGAGCAGGACAGCAAGGACAGCACCTACAGCC |
| | | TGAGCAGCACCCTGACCCTGAGCAAGGCCGACTACGAGAAGCACAAGGTGTA |
| | | CGCCTGCGAGGTGACCCACCAGGGCCTGAGCAGCCCCGTGACCAAGAGCTTC |
| | | AACAGGGGCGAGTGC |
| ANX-007 | Heavy/ | CAGGTGCAGCTGGTGCAGAGCGGCGCCGAGCTGAAGAAGCCCGGCGCCAGCG |
| | SEQ ID | TGAAGGTGAGCTGCAAGAGCAGCGGCTACCACTTCACCAGCTACTGGATGCA |
| | NO: 113 | CTGGGTGAAGCAGGCCCCCGGCCAGGGCCTGGAGTGGATCGGCGTGATCCAC |
| | | cCCAACAGCGGCAGCATCAACTACAACGAGAAGTTCGAGAGCAGGGTGACCA |
| | | TCACCGTGGACAAGAGCACCAGCACCGCCTACATGGAGCTGAGCAGCCTGAG |
| | | GAGCGAGGACACCGCCGTGTACTACTGCGCCGGCGAGAGGGACAGCACCGAG |
| | | GTGCTGCCCATGGACTACTGGGGCCAGGGCACCACCGTGACCGTGAGCAGCG |
| | | CCAGCACCAAGGGCCCCAGCGTGTTCCCCCTGGCCCCCAGCAGCAAGAGCAC |
| | | CAGCGGCGGCACCGCCGCCCTGGGCTGCCTGGTGAAGGACTACTTCCCCGAG |
| | | CCCGTGACCGTGAGCTGGAACAGCGGCGCCCTGACCAGCGGCGTGCACACCT |
| | | TCCCCGCCGTGCTGCAGAGCAGCGGCCTGTACAGCCTGAGCAGCGTGGTGAC |
| | | CGTGCCCAGCAGCAGCCTGGGCACCCAGACCTACATCTGCAACGTGAACCAC |
| | | AAGCCCAGCAACACCAAGGTGGACAAGAGGGTGGAGCCCAAGAGCTGCGAC |
| | | +/− AAGACCCACACC (or AAGACCCACCTG) +/− |
| | | TGCCCCCCCTGCCCCGCC +/− CCCGAGCTGCTGGGCGGCCCCAGCGTGTT |
| | | CCTG |
| ANX-007 | Light/ | GACGTGCAGATCACCCAGAGCCCCAGCAGCCTGAGCGCCAGCCTGGGCGAGA |
| | SEQ ID | GGGCCACCATCAACTGCAGGGCCAGCAAGAGCATCAACAAGTACCTGGCCTG |
| | NO: 114 | GTACCAGCAGAAGCCCGGCAAGGCCCCCAAGCTGCTGATCTACAGCGGCAGC |
| | | ACCCTGCAGAGCGGCATCCCCGCCAGGTTCAGCGGCAGCGGCAGCGGCACCG |
| | | ACTTCACCCTGACCATCAGCAGCCTGGAGCCCGAGGACTTCGCCATGTACTA |
| | | CTGCCAGCAGCACAACGAGTACCCCCTGACCTTCGGCCAGGGCACCAAGCTG |
| | | GAGATCAAGAGGACCGTGGCCGCCCCCAGCGTGTTCATCTTCCCCCCCAGCG |
| | | ACGAGCAGCTGAAGAGCGGCACCGCCAGCGTGGTGTGCCTGCTGAACAACTT |
| | | CTACCCCAGGGAGGCCAAGGTGCAGTGGAAGGTGGACAACGCCCTGCAGAGC |
| | | GGCAACAGCCAGGAGAGCGTGACCGAGCAGGACAGCAAGGACAGCACCTACA |
| | | GCCTGAGCAGCACCCTGACCCTGAGCAAGGCCGACTACGAGAAGCACAAGGT |
| | | GTACGCCTGCGAGGTGACCCACCAGGGCCTGAGCAGCCCCGTGACCAAGAGC |
| | | TTCAACAGGGGCGAGTGC |
| Adalimumab | Heavy/ | GAGGTGCAGCTGGTGGAGAGCGGCGGCGGCCTGGTGCAGCCCGGCAGGAGCC |
| | SEQ ID | TGAGGCTGAGCTGCGCCGCCAGCGGCTTCACCTTCGACGACTACGCCATGCA |
| | NO: 115 | CTGGGTGAGGCAGGCCCCCGGCAAGGGCCTGGAGTGGGTGAGCGCCATCACC |
| | | TGGAACAGCGGCCACATCGACTACGCCGACAGCGTGGAGGGCAGGTTCACCA |
| | | TCAGCAGGGACAACGCCAAGAACAGCCTGTACCTGCAGATGAACAGCCTGAG |
| | | GGCCGAGGACACCGCCGTGTACTACTGCGCCAAGGTGAGCTACCTGAGCACC |
| | | GCCAGCAGCCTGGACTACTGGGGCCAGGGCACCCTGGTGACCGTGAGCAGCG |
| | | CCAGCACCAAGGGCCCCAGCGTGTTCCCCCTGGCCCCCAGCAGCAAGAGCAC |
| | | CAGCGGCGGCACCGCCGCCCTGGGCTGCCTGGTGAAGGACTACTTCCCCGAG |
| | | CCCGTGACCGTGAGCTGGAACAGCGGCGCCCTGACCAGCGGCGTGCACACCT |
| | | TCCCCGCCGTGCTGCAGAGCAGCGGCCTGTACAGCCTGAGCAGCGTGGTGAC |
| | | CGTGCCCAGCAGCAGCCTGGGCACCCAGACCTACATCTGCAACGTGAACCAC |
| | | AAGCCCAGCAACACCAAGGTGGACAAGAAGGTGGAGCCCAAGAGCTGCGAC |
| | | +/− AAGACCCACACC (or AAGACCCACCTG) +/− |
| | | TGCCCCCCCTGCCCCGCC +/− CCCGAGCTGCTGGGCGGCCCCAGCGTGTT |
| | | CCTG |
| Adalimumab | Light/ | GACATCCAGATGACCCAGAGCCCCAGCAGCCTGAGCGCCAGCGTGGGCGACA |
| | SEQ ID | GGGTGACCATCACCTGCAGGGCCAGCCAGGGCATCAGGAACTACCTGGCCTG |
| | NO: 116 | GTACCAGCAGAAGCCCGGCAAGGCCCCCAAGCTGCTGATCTACGCCGCCAGC |
| | | ACCCTGCAGAGCGGCGTGCCCAGCAGGTTCAGCGGCAGCGGCAGCGGCACCG |
| | | ACTTCACCCTGACCATCAGCAGCCTGCAGCCCGAGGACGTGGCCACCTACTA |
| | | CTGCCAGAGGTACAACAGGGCCCCCTACACCTTCGGCCAGGGCACCAAGGTG |
| | | GAGATCAAGAGGACCGTGGCCGCCCCCAGCGTGTTCATCTTCCCCCCCAGCG |
| | | ACGAGCAGCTGAAGAGCGGCACCGCCAGCGTGGTGTGCCTGCTGAACAACTT |
| | | CTACCCCAGGGAGGCCAAGGTGCAGTGGAAGGTGGACAACGCCCTGCAGAGC |
| | | GGCAACAGCCAGGAGAGCGTGACCGAGCAGGACAGCAAGGACAGCACCTACA |
| | | GCCTGAGCAGCACCCTGACCCTGAGCAAGGCCGACTACGAGAAGCACAAGGT |
| | | GTACGCCTGCGAGGTGACCCACCAGGGCCTGAGCAGCCCCGTGACCAAGAGC |
| | | TTCAACAGGGGCGAGTGC |
| Infliximab | Heavy/ | GAGGTGAAGCTGGAGGAGAGCGGCGGCGGCCTGGTGCAGCCCGGCGGCAGCA |
| | SEQ ID | TGAAGCTGAGCTGCGTGGCCAGCGGCTTCATCTTCAGCAACCACTGGATGAA |
| | NO: 117 | CTGGGTGAGGCAGAGCCCCGAGAAGGGCCTGGAGTGGGTGGCCGAGATCAGG |
| | | AGCAAGAGCATCAACAGCGCCACCCACTACGCCGAGAGCGTGAAGGGCAGGT |
| | | TCACCATCAGCAGGGACGACAGCAAGAGCGCCGTGTACCTGCAGATGACCGA |
| | | CCTGAGGACCGAGGACACCGGCGTGTACTACTGCAGCAGGAACTACTACGGC |
| | | AGCACCTACGACTACTGGGGCCAGGGCACCACCCTGACCGTGAGCAGCGCCA |
| | | GCACCAAGGGCCCCAGCGTGTTCCCCCTGGCCCCCAGCAGCAAGAGCACCAG |
| | | CGGCGGCACCGCCGCCCTGGGCTGCCTGGTGAAGGACTACTTCCCCGAGCCC |
| | | GTGACCGTGAGCTGGAACAGCGGCGCCCTGACCAGCGGCGTGCACACCTTCC |
| | | CCGCCGTGCTGCAGAGCAGCGGCCTGTACAGCCTGAGCAGCGTGGTGACCGT |
| | | GCCCAGCAGCAGCCTGGGCACCCAGACCTACATCTGCAACGTGAACCACAAG |
| | | CCCAGCAACACCAAGGTGGACAAGAAGGTGGAGCCCAAGAGCTGCGAC +/− |
| | | AAGACCCACACC (or AAGACCCACCTG) +/− |
| | | TGCCCCCCCTGCCCCGCC +/− |
| | | CCCGAGCTGCTGGGCGGCCCCAGCGTGTTCCTG |
| Infliximab | Light/ | GACATCCTGCTGACCCAGAGCCCCGCCATCCTGAGCGTGAGCCCCGGCGAGA |
| | SEQ ID | GGGTGAGCTTCAGCTGCAGGGCCAGCCAGTTCGTGGGCAGCAGCATCCACTG |
| | NO: 118 | GTACCAGCAGAGGACCAACGGCAGCCCCAGGCTGCTGATCAAGTACGCCAGC |
| | | GAGAGCATGAGCGGCATCCCCAGCAGGTTCAGCGGCAGCGGCAGCGGCACCG |
| | | ACTTCACCCTGAGCATCAACACCGTGGAGAGCGAGGACATCGCCGACTACTA |
| | | CTGCCAGCAGAGCCACAGCTGGCCCTTCACCTTCGGCAGCGGCACCAACCTG |
| | | GAGGTGAAGAGGACCGTGGCCGCCCCCAGCGTGTTCATCTTCCCCCCCAGCG |
| | | ACGAGCAGCTGAAGAGCGGCACCGCCAGCGTGGTGTGCCTGCTGAACAACTT |
| | | CTACCCCAGGGAGGCCAAGGTGCAGTGGAAGGTGGACAACGCCCTGCAGAGC |
| | | GGCAACAGCCAGGAGAGCGTGACCGAGCAGGACAGCAAGGACAGCACCTACA |
| | | GCCTGAGCAGCACCCTGACCCTGAGCAAGGCCGACTACGAGAAGCACAAGGT |
| | | GTACGCCTGCGAGGTGACCCACCAGGGCCTGAGCAGCCCCGTGACCAAGAGC |
| | | TTCAACAGGGGCGAGTGC |
| Golimumab | Heavy/ | AGCAAGCTGCAGGTGCAGCTGGTGGAGAGCGGCGGCGGCGTGGTGCAGCCCG |
| | SEQ ID | GCAGGAGCCTGAGGCTGAGCTGCGCCGCCAGCGGCTTCATCTTCAGCAGCTA |
| | NO: 119 | CGCCATGCACTGGGTGAGGCAGGCCCCCGGCAACGGCCTGGAGTGGGTGGCC |
| | | TTCATGAGCTACGACGGCAGCAACAAGAAGTACGCCGACAGCGTGAAGGGCA |
| | | GGTTCACCATCAGCAGGGACAACAGCAAGAACACCCTGTACCTGCAGATGAA |
| | | CAGCCTGAGGGCCGAGGACACCGCCGTGTACTACTGCGCCAGGGACAGGGGC |
| | | ATCGCCGCCGGCGGCAACTACTACTACTACGGCATGGACGTGTGGGGCCAGG |
| | | GCACCACCGTGACCGTGAGCAGCGCCAGCACCAAGGGCCCCAGCGTGTTCCC |
| | | CCTGGCCCCCAGCAGCAAGAGCACCAGCGGCGGCACCGCCGCCCTGGGCTGC |
| | | CTGGTGAAGGACTACTTCCCCGAGCCCGTGACCGTGAGCTGGAACAGCGGCG |
| | | CCCTGACCAGCGGCGTGCACACCTTCCCCGCCGTGCTGCAGAGCAGCGGCCT |
| | | GTACAGCCTGAGCAGCGTGGTGACCGTGCCCAGCAGCAGCCTGGGCACCCAG |
| | | ACCTACATCTGCAACGTGAACCACAAGCCCAGC +/− AAGACCCACACC |
| | | (or AAGACCCACCTG) +/− TGCCCCCCCTGCCCCGCC +/− |
| | | CCCGAGCTGCTGGGCGGCCCCAGCGTGTTCCTG |
| Golimumab | Light/ | GCCGGCAGCGAGATCGTGCTGACCCAGAGCCCCGCCACCCTGAGCCTGAGCC |
| | SEQ ID | CCGGCGAGAGGGCCACCCTGAGCTGCAGGGCCAGCCAGAGCGTGTACAGCTA |
| | NO: 120 | CCTGGCCTGGTACCAGCAGAAGCCCGGCCAGGCCCCCAGGCTGCTGATCTAC |
| | | GACGCCAGCAACAGGGCCACCGGCATCCCCGCCAGGTTCAGCGGCAGCGGCA |
| | | GCGGCACCGACTTCACCCTGACCATCAGCAGCCTGGAGCCCGAGGACTTCGC |
| | | CGTGTACTACTGCCAGCAGAGGAGCAACTGGCCCCCCTTCACCTTCGGCCCC |
| | | GGCACCAAGGTGGACATCAAGAGGACCGTGGCCGCCCCCAGCGTGTTCATCT |
| | | TCCCCCCCAGCGACGAGCAGCTGAAGAGCGGCACCGCCAGCGTGGTGTGCCT |
| | | GCTGAACAACTTCTACCCCAGGGAGGCCAAGGTGCAGTGGAAGGTGGACAAC |
| | | GCCCTGCAGAGCGGCAACAGCCAGGAGAGCGTGACCGAGCAGGACAGCAAGG |
| | | ACAGCACCTACAGCCTGAGCAGCACCCTGACCCTGAGCAAGGCCGACTACGA |
| | | GAAGCACAAGGTGTACGCCTGCGAGGTGACCCACCAGGGCCTGAGCAGCCCC |
| | | GTGACCAAGAGCTTCAACAGGGGCGAGTGC |
| Elezanumab | Heavy/ | GAGGTGCAGCTGGTGCAGAGCGGCGCCGAGGTGAAGAAGCCCGGCGCCAGCG |
| | SEQ ID | TGAAGGTGAGCTGCAAGGCCAGCGGCTACACCTTCACCAGCCACGGCATCAG |
| | NO: 121 | CTGGGTGAGGCAGGCCCCCGGCCAGGGCCTGGACTGGATGGGCTGGATCAGC |
| | | CCCTACAGCGGCAACACCAACTACGCCCAGAAGCTGCAGGGCAGGGTGACCA |
| | | TGACCACCGACACCAGCACCAGCACCGCCTACATGGAGCTGAGCAGCCTGAG |
| | | GAGCGAGGACACCGCCGTGTACTACTGCGCCAGGGTGGGCAGCGGCCCCTAC |
| | | TACTACATGGACGTGTGGGGCCAGGGCACCCTGGTGACCGTGAGCAGCGCCA |
| | | GCACCAAGGGCCCCAGCGTGTTCCCCCTGGCCCCCAGCAGCAAGAGCACCAG |
| | | CGGCGGCACCGCCGCCCTGGGCTGCCTGGTGAAGGACTACTTCCCCGAGCCC |
| | | GTGACCGTGAGCTGGAACAGCGGCGCCCTGACCAGCGGCGTGCACACCTTCC |
| | | CCGCCGTGCTGCAGAGCAGCGGCCTGTACAGCCTGAGCAGCGTGGTGACCGT |
| | | GCCCAGCAGCAGCCTGGGCACCCAGACCTACATCTGCAACGTGAACCACAAG |
| | | CCCAGCAACACCAAGGTGGACAAGAAGGTGGAGCCCAAGAGCTGCGAC +/− |
| | | AAGACCCACACC (or AAGACCCACCTG) +/− |
| | | TGCCCCCCCTGCCCCGCC +/− |
| | | CCCGAGGCCGCCGGCGGCCCCAGCGTGTTCCTG |
| Elezanumab | Light/ | CAGAGCGCCCTGACCCAGCCCAGGAGCGTGAGCGGCAGCCCCGGCCAGAGCG |
| | SEQ ID | TGACCATCAGCTGCACCGGCACCAGCAGCAGCGTGGGCGACAGCATCTACGT |
| | NO: 122 | GAGCTGGTACCAGCAGCACCCCGGCAAGGCCCCCAAGCTGATGCTGTACGAC |
| | | GTGACCAAGAGGCCCAGCGGCGTGCCCGACAGGTTCAGCGGCAGCAAGAGCG |
| | | GCAACACCGCCAGCCTGACCATCAGCGGCCTGCAGGCCGAGGACGAGGCCGA |
| | | CTACTACTGCTACAGCTACGCCGGCACCGACACCCTGTTCGGCGGCGGCACC |
| | | AAGGTGACCGTGCTGGGCCAGCCCAAGGCCGCCCCCAGCGTGACCCTGTTCC |
| | | CCCCCAGCAGCGAGGAGCTGCAGGCCAACAAGGCCACCCTGGTGTGCCTGAT |
| | | CAGCGACTTCTACCCCGGCGCCGTGACCGTGGCCTGGAAGGCCGACAGCAGC |
| | | CCCGTGAAGGCCGGCGTGGAGACCACCACCCCCAGCAAGCAGAGCAACAACA |
| | | AGTACGCCGCCAGCAGCTACCTGAGCCTGACCCCCGAGCAGTGGAAGAGCCA |
| | | CAGGAGCTACAGCTGCCAGGTGACCCACGAGGGCAGCACCGTGGAGAAGACC |
| | | GTGGCCCCCACCGAGTGCAGC |
| NI-301 | Heavy/ | CAGGTGCAGCTGCAGGAGAGCGGCCCCGGCCTGGTGAAGCCCAGCGAGACCC |
| | SEQ ID | TGAGCCTGACCTGCAGCGTGAGCGGCGGCAGCATCATCAGCAGGAGCAGCTA |
| | NO: 123 | CTGGGGCTGGATCAGGCAGCCCCCCGGCAAGGGCCTGGAGTGGATCGGCGGC |
| | | ATCTACCACAGCGGCAACACCTACGACAACCCCAGCCTGAAGAGCAGGCTGA |
| | | CCATGAGCGTGGACACCAGCAAGAACCAGTTCAGCCTGAACCTGAGGAGCGT |
| | | GACCGCCGCCGACACCGCCGTGTACTACTGCGCCAGGATCGTGCCCGGCGGC |
| | | GACGCCTTCGACATCTGGGGCCAGGGCACCATGGTGACCGTGAGCAGCGCCA |
| | | GCACCAAGGGCCCCAGCGTGTTCCCCCTGGCCCCCAGCAGCAAGAGCACCAG |
| | | CGGCGGCACCGCCGCCCTGGGCTGCCTGGTGAAGGACTACTTCCCCGAGCCC |
| | | GTGACCGTGAGCTGGAACAGCGGCGCCCTGACCAGCGGCGTGCACACCTTCC |
| | | CCGCCGTGCTGCAGAGCAGCGGCCTGTACAGCCTGAGCAGCGTGGTGACCGT |
| | | GCCCAGCAGCAGCCTGGGCACCCAGACCTACATCTGCAACGTGAACCACAAG |
| | | CCCAGCAACACCAAGGTGGACAAGAGGGTGGAGCCCAAGAGCTGCGAC +/− |
| | | AAGACCCACACC (or AAGACCCACCTG) +/− |
| | | TGCCCCCCCTGCCCCGCC +/− CCCGAGCTGCTGGGCGGCCCCAGCGTG |
| | | TTCCTG |
| NI-301 | Light/ | GACATCCAGATGACCCAGAGCCCCAGCAGCCTGAGCGCCAGCGTGGGCGACA |
| | SEQ ID | GGGTGACCGCCTGCAGGGCCAGCCAGAGCGTGGGCACCTACCTGAACTGGTA |
| | NO: 124 | CCAGCAGAAGAGGGGCAAGGCCCCCAAGCTGCTGATCTTCGCCGCCAGCAGC |
| | | CTGCAGAGCGGCGTGCCCAGCAGGTTCAGCGGCAGCGGCAGCGGCACCGACT |
| | | TCACCCTGACCATCAGCAGCCTGCAGCCCGAGGACTTCGCCACCTACTACTG |
| | | CCAGCAGAGCTACAGCAGCCCCCCCACCTTCGGCCAGGGCACCAAGGTGGAG |
| | | ATCAAGAGGACCGTGGCCGCCCCCAGCGTGTTCATCTTCCCCCCCAGCGACG |
| | | AGCAGCTGAAGAGCGGCACCGCCAGCGTGGTGTGCCTGCTGAACAACTTCTA |
| | | CCCCAGGGAGGCCAAGGTGCAGTGGAAGGTGGACAACGCCCTGCAGAGCGGC |
| | | AACAGCCAGGAGAGCGTGACCGAGCAGGACAGCAAGGACAGCACCTACAGCC |
| | | TGAGCAGCACCCTGACCCTGAGCAAGGCCGACTACGAGAAGCACAAGGTGTA |
| | | CGCCTGCGAGGTGACCCACCAGGGCCTGAGCAGCCCCGTGACCAAGAGCTTC |
| | | AACAGGGGCGAGTGC |
| PRX-004 | Heavy/ | GAGGTGCAGCTGGTGGAGAGCGGCGGCGGCCTGATCCAGCCCGGCGGCAGCC |
| | SEQ ID | TGAGGCTGAGCTGCGCCGCCAGCGGCTTCACCTTCAGCAACTACGCCATGAG |
| | NO: 125 | CTGGGTGAGGCAGGCCCCCGGCAAGGGCCTGGAGTGGGTGAGCAGCATCAGC |
| | | AGCGGCGGCAGCACCTACTACCCCGACAGCGTGAAGGGCAGGTTCACCATCA |
| | | GCAGGGACAACAGCAAGAACACCCTGTACCTGCAGATGAACAGCCTGAGGGC |
| | | CGAGGACACCGCCGTGTACTACTGCGCCAGGTACTACTACGGCCAGTACTTC |
| | | GACTTCTGGGGCCAGGGCACCCTGGTGACCGTGAGCAGCGCCAGCACCAAGG |
| | | GCCCCAGCGTGTTCCCCCTGGCCCCCAGCAGCAAGAGCACCAGCGGCGGCAC |
| | | CGCCGCCCTGGGCTGCCTGGTGAAGGACTACTTCCCCGAGCCCGTGACCGTG |
| | | AGCTGGAACAGCGGCGCCCTGACCAGCGGCGTGCACACCTTCCCCGCCGTGC |
| | | TGCAGAGCAGCGGCCTGTACAGCCTGAGCAGCGTGGTGACCGTGCCCAGCAG |
| | | CAGCCTGGGCACCCAGACCTACATCTGCAACGTGAACCACAAGCCCAGCAAC |
| | | ACCAAGGTGGACAAGAGGGTGGAGCCCAAGAGCTGCGAC +/− |
| | | AAGACCCACACC (or AAGACCCACCTG) +/− |
| | | TGCCCCCCCTGCCCCGCC +/− CCCGAGCTGCTGGGCGGCCCCAGCGTGTT |
| | | CCTG |
| PRX-004 | Light/ | GACATCGTGATGACCCAGAGCCCCAGCAGCCTGAGCGCCAGCGTGGGCGACA |
| | SEQ ID | GGGTGACCATCACCTGCAAGGCCAGCCAGGACGTGAGCACCACCGTGGCCTG |
| | NO: 126 | GTACCAGCAGAAGCCCGGCAAGGCCCCCAAGCTGCTGATCTACAGCGCCAGC |
| | | TACAGGAGCACCGGCGTGCCCAGCAGGTTCAGCGGCAGCGGCAGCGGCACCG |
| | | ACTTCACCCTGACCATCAGCAGCCTGCAGCCCGAGGACTTCGCCGTGTACTA |
| | | CTGCCAGCAGCACTACAGCACCCCCCTGACCTTCGGCGGCGGCACCAAGGTG |
| | | GAGATCAAGAGGACCGTGGCCGCCCCCAGCGTGTTCATCTTCCCCCCCAGCG |
| | | ACGAGCAGCTGAAGAGCGGCACCGCCAGCGTGGTGTGCCTGCTGAACAACTT |
| | | CTACCCCAGGGAGGCCAAGGTGCAGTGGAAGGTGGACAACGCCCTGCAGAGC |
| | | GGCAACAGCCAGGAGAGCGTGACCGAGCAGGACAGCAAGGACAGCACCTACA |
| | | GCCTGAGCAGCACCCTGACCCTGAGCAAGGCCGACTACGAGAAGCACAAGGT |
| | | GTACGCCTGCGAGGTGACCCACCAGGGCCTGAGCAGCCCCGTGACCAAGAGC |
| | | TTCAACAGGGGCGAGTGC |
| Pamrevlumab | Heavy/ | GAGGTGCAGCTGGTGCAGAGCGGCGCCGAGGTGAAGAAGCCCGGCAGCAGCG |
| | SEQ ID | TGAAGGTGAGCTGCAAGGCCAGCGGCGGCACCTTCAGCAGCTACGCCATCAG |
| | NO: 127 | CTGGGTGAGGCAGGCCCCCGGCCAGGGCCTGGAGTGGATGGGCGGCATCGGC |
| | | CCCTTCTTCGGCACCGCCAACTACGCCCAGAAGTTCCAGGGCAGGGTGACCA |
| | | TCACCGCCGACGAGAGCACCAGCACCGCCTACATGGAGCTGAGCAGCCTGAG |
| | | GAGCGAGGACACCGCCGTGTACTACTGCGCCAGGGACACCCCCTACTTCGAC |
| | | TACTGGGGCCAGGGCACCCTGGTGACCGTGAGCAGCGCCAGCACCAAGGGCC |
| | | CCAGCGTGTTCCCCCTGGCCCCCAGCAGCAAGAGCACCAGCGGCGGCACCGC |
| | | CGCCCTGGGCTGCCTGGTGAAGGACTACTTCCCCGAGCCCGTGACCGTGAGC |
| | | TGGAACAGCGGCGCCCTGACCAGCGGCGTGCACACCTTCCCCGCCGTGCTGC |
| | | AGAGCAGCGGCCTGTACAGCCTGAGCAGCGTGGTGACCGTGCCCAGCAGCAG |
| | | CCTGGGCACCCAGACCTACATCTGCAACGTGAACCACAAGCCCAGCAACACC |
| | | AAGGTGGACAAGAGGGTGGAGCCCAAGAGCTGCGAC +/− AAGACCCACACC |
| | | (or AAGACCCACCTG) +/− TGCCCCCCCTGCCCCGCC +/− |
| | | CCCGAGGCCGCCGGCGGCCCCAGCGTGTTCCTG |
| Pamrevlumab | Light/ | AGCTACGAGCTGACCCAGCCCCTGAGCGTGAGCGTGGCCCTGGGCCAGACCG |
| | SEQ ID | CCAGGATCACCTGCAGCGGCGACAGCATCCCCAACTACTACGTGTACTGGTA |
| | NO: 128 | CCAGCAGAAGCCCGGCCAGGCCCCCGTGCTGGTGATCTACGACGACAGCAAC |
| | | AGGCCCAGCGGCATCCCCGAGAGGTTCAGCGGCAGCAACAGCGGCAACACCG |
| | | CCACCCTGACCATCAGCAGGGCCCAGGCCGGCGACGAGGCCGACTACTACTG |
| | | CCAGAGCTTCGACAGCAGCCTGAACGCCGAGGTGTTCGGCGGCGGCACCAAG |
| | | CTGACCGTGCTGGGCCAGCCCAAGGCCGCCCCCAGCGTGACCCTGTTCCCCC |
| | | CCAGCAGCGAGGAGCTGCAGGCCAACAAGGCCACCCTGGTGTGCCTGATCAG |
| | | CGACTTCTACCCCGGCGCCGTGACCGTGGCCTGGAAGGCCGACAGCAGCCCC |
| | | GTGAAGGCCGGCGTGGAGACCACCACCCCCAGCAAGCAGAGCAACAACAAGT |
| | | ACGCCGCCAGCAGCTACCTGAGCCTGACCCCCGAGCAGTGGAAGAGCCACAG |
| | | GAGCTACAGCTGCCAGGTGACCCACGAGGGCAGCACCGTGGAGAAGACCGTG |
| | | GCCCCCACCGAGTGCAGC |
| Satralizumab | Heavy/ | CAGGTGCAGCTGCAGGAGAGCGGCCCCGGCCTGGTGAAGCCCAGCGAGACCC |
| | SEQ ID | TGAGCCTGACCTGCGCCGTGAGCGGCCACAGCATCAGCCACGACCACGCCTG |
| | NO: 129 | GAGCTGGGTGAGGCAGCCCCCCGGCGAGGGCCTGGAGTGGATCGGCTTCATC |
| | | AGCTACAGCGGCATCACCAACTACAACCCCAGCCTGCAGGGCAGGGTGACCA |
| | | TCAGCAGGGACAACAGCAAGAACACCCTGTACCTGCAGATGAACAGCCTGAG |
| | | GGCCGAGGACACCGCCGTGTACTACTGCGCCAGGAGCCTGGCCAGGACCACC |
| | | GCCATGGACTACTGGGGCGAGGGCACCCTGGTGACCGTGAGCAGCGCCAGCA |
| | | CCAAGGGCCCCAGCGTGTTCCCCCTGGCCCCCAGCAGCAAGAGCACCAGCGG |
| | | CGGCACCGCCGCCCTGGGCTGCCTGGTGAAGGACTACTTCCCCGAGCCCGTG |
| | | ACCGTGAGCTGGAACAGCGGCGCCCTGACCAGCGGCGTGCACACCTTCCCCG |
| | | CCGTGCTGCAGAGCAGCGGCCTGTACAGCCTGAGCAGCGTGGTGACCGTGCC |
| | | CAGCAGCAACTTCGGCACCCAGACCTACACCTGCAACGTGGACCACAAGCCC |
| | | AGCAACACCAAGGTGGACAAGACCGTGGAGAGGAAGAGCTGCGTGGAG |
| | | +/− TGCCCCCCCTGCCCCGCC +/− CCCCCCGTGGCCGGC |
| Satralizumab | Light/ | GACATCCAGATGACCCAGAGCCCCAGCAGCCTGAGCGCCAGCGTGGGCGACA |
| | SEQ ID | GCGTGACCATCACCTGCCAGGCCAGCACCGACATCAGCAGCCACCTGAACTG |
| | NO: 130 | GTACCAGCAGAAGCCCGGCAAGGCCCCCGAGCTGCTGATCTACTACGGCAGC |
| | | CACCTGCTGAGCGGCGTGCCCAGCAGGTTCAGCGGCAGCGGCAGCGGCACCG |
| | | ACTTCACCTTCACCATCAGCAGCCTGGAGGCCGAGGACGCCGCCACCTACTA |
| | | CTGCGGCCAGGGCAACAGGCTGCCCTACACCTTCGGCCAGGGCACCAAGGTG |
| | | GAGATCGAGAGGACCGTGGCCGCCCCCAGCGTGTTCATCTTCCCCCCCAGCG |
| | | ACGAGCAGCTGAAGAGCGGCACCGCCAGCGTGGTGTGCCTGCTGAACAACTT |
| | | CTACCCCAGGGAGGCCAAGGTGCAGTGGAAGGTGGACAACGCCCTGCAGAGC |
| | | GGCAACAGCCAGGAGAGCGTGACCGAGCAGGACAGCAAGGACAGCACCTACA |
| | | GCCTGAGCAGCACCCTGACCCTGAGCAAGGCCGACTACGAGAAGCACAAGGT |
| | | GTACGCCTGCGAGGTGACCCACCAGGGCCTGAGCAGCCCCGTGACCAAGAGC |
| | | TTCAACAGGGGCGAGTGC |
| Sarilumab | Heavy/ | GAGGTGCAGCTGGTGGAGAGCGGCGGCGGCCTGGTGCAGCCCGGCAGGAGCC |
| | SEQ ID | TGAGGCTGAGCTGCGCCGCCAGCAGGTTCACCTTCGACGACTACGCCATGCA |
| | NO: 131 | CTGGGTGAGGCAGGCCCCCGGCAAGGGCCTGGAGTGGGTGAGCGGCATCAGC |
| | | TGGAACAGCGGCAGGATCGGCTACGCCGACAGCGTGAAGGGCAGGTTCACCA |
| | | TCAGCAGGGACAACGCCGAGAACAGCCTGTTCCTGCAGATGAACGGCCTGAG |
| | | GGCCGAGGACACCGCCCTGTACTACTGCGCCAAGGGCAGGGACAGCTTCGAC |
| | | ATCTGGGGCCAGGGCACCATGGTGACCGTGAGCAGCGCCAGCACCAAGGGCC |
| | | CCAGCGTGTTCCCCCTGGCCCCCAGCAGCAAGAGCACCAGCGGCGGCACCGC |
| | | CGCCCTGGGCTGCCTGGTGAAGGACTACTTCCCCGAGCCCGTGACCGTGAGC |
| | | TGGAACAGCGGCGCCCTGACCAGCGGCGTGCACACCTTCCCCGCCGTGCTGC |
| | | AGAGCAGCGGCCTGTACAGCCTGAGCAGCGTGGTGACCGTGCCCAGCAGCAG |
| | | CCTGGGCACCCAGACCTACATCTGCAACGTGAACCACAAGCCCAGCAACACC |
| | | AAGGTGGACAAGAAGGTGGAGCCCAAGAGCTGCGAC +/− AAGACCCACACC |
| | | (or AAGACCCACCTG) +/− TGCCCCCCCTGCCCCGCC +/− |
| | | CCCGAGCTGCTGGGCGGCCCCAGCGTGTTCCTG |
| Sarilumab | Light/ | GACATCCAGATGACCCAGAGCCCCAGCAGCGTGAGCGCCAGCGTGGGCGACA |
| | SEQ ID | GGGTGACCATCACCTGCAGGGCCAGCCAGGGCATCAGCAGCTGGCTGGCCTG |
| | NO: 132 | GTACCAGCAGAAGCCCGGCAAGGCCCCCAAGCTGCTGATCTACGGCGCCAGC |
| | | AGCCTGGAGAGCGGCGTGCCCAGCAGGTTCAGCGGCAGCGGCAGCGGCACCG |
| | | ACTTCACCCTGACCATCAGCAGCCTGCAGCCCGAGGACTTCGCCAGCTACTA |
| | | CTGCCAGCAGGCCAACAGCTTCCCCTACACCTTCGGCCAGGGCACCAAGCTG |
| | | GAGATCAAGAGGACCGTGGCCGCCCCCAGCGTGTTCATCTTCCCCCCCAGCG |
| | | ACGAGCAGCTGAAGAGCGGCACCGCCAGCGTGGTGTGCCTGCTGAACAACTT |
| | | CTACCCCAGGGAGGCCAAGGTGCAGTGGAAGGTGGACAACGCCCTGCAGAGC |
| | | GGCAACAGCCAGGAGAGCGTGACCGAGCAGGACAGCAAGGACAGCACCTACA |
| | | GCCTGAGCAGCACCCTGACCCTGAGCAAGGCCGACTACGAGAAGCACAAGGT |
| | | GTACGCCTGCGAGGTGACCCACCAGGGCCTGAGCAGCCCCGTGACCAAGAGC |
| | | TTCAACAGGGGCGAGTGC |
| Inebilizumab | Heavy/ | GAGGTGCAGCTGGTGGAGAGCGGCGGCGGCCTGGTGCAGCCCGGCGGCAGCC |
| | SEQ ID | TGAGGCTGAGCTGCGCCGCCAGCGGCTTCACCTTCAGCAGCAGCTGGATGAA |
| | NO: 133 | CTGGGTGAGGCAGGCCCCCGGCAAGGGCCTGGAGTGGGTGGGCAGGATCTAC |
| | | CCCGGCGACGGCGACACCAACTACAACGTGAAGTTCAAGGGCAGGTTCACCA |
| | | TCAGCAGGGACGACAGCAAGAACAGCCTGTACCTGCAGATGAACAGCCTGAA |
| | | GACCGAGGACACCGCCGTGTACTACTGCGCCAGGAGCGGCTTCATCACCACC |
| | | GTGAGGGACTTCGACTACTGGGGCCAGGGCACCCTGGTGACCGTGAGCAGCG |
| | | CCAGCACCAAGGGCCCCAGCGTGTTCCCCCTGGCCCCCAGCAGCAAGAGCAC |
| | | CAGCGGCGGCACCGCCGCCCTGGGCTGCCTGGTGAAGGACTACTTCCCCGAG |
| | | CCCGTGACCGTGAGCTGGAACAGCGGCGCCCTGACCAGCGGCGTGCACACCT |
| | | TCCCCGCCGTGCTGCAGAGCAGCGGCCTGTACAGCCTGAGCAGCGTGGTGAC |
| | | CGTGCCCAGCAGCAGCCTGGGCACCCAGACCTACATCTGCAACGTGAACCAC |
| | | AAGCCCAGCAACACCAAGGTGGACAAGAGGGTGGAGCCCAAGAGCTGCGAC |
| | | +/− AAGACCCACACC (or AAGACCCACCTG) +/− |
| | | TGCCCCCCCTGCCCCGCC +/− CCCGAGCTGCTGGGCGGCCCCAGCGTGT |
| | | TCCTG |
| Inebilizumab | Light/ | GAGATCGTGCTGACCCAGAGCCCCGACTTCCAGAGCGTGACCCCCAAGGAGA |
| | SEQ ID | AGGTGACCATCACCTGCAGGGCCAGCGAGAGCGTGGACACCTTCGGCATCAG |
| | NO: 134 | CTTCATGAACTGGTTCCAGCAGAAGCCCGACCAGAGCCCCAAGCTGCTGATC |
| | | CACGAGGCCAGCAACCAGGGCAGCGGCGTGCCCAGCAGGTTCAGCGGCAGCG |
| | | GCAGCGGCACCGACTTCACCCTGACCATCAACAGCCTGGAGGCCGAGGACGC |
| | | CGCCACCTACTACTGCCAGCAGAGCAAGGAGGTGCCCTTCACCTTCGGCGGC |
| | | GGCACCAAGGTGGAGATCAAGAGGACCGTGGCCGCCCCCAGCGTGTTCATCT |
| | | TCCCCCCCAGCGACGAGCAGCTGAAGAGCGGCACCGCCAGCGTGGTGTGCCT |
| | | GCTGAACAACTTCTACCCCAGGGAGGCCAAGGTGCAGTGGAAGGTGGACAAC |
| | | GCCCTGCAGAGCGGCAACAGCCAGGAGAGCGTGACCGAGCAGGACAGCAAGG |
| | | ACAGCACCTACAGCCTGAGCAGCACCCTGACCCTGAGCAAGGCCGACTACGA |
| | | GAAGCACAAGGTGTACGCCTGCGAGGTGACCCACCAGGGCCTGAGCAGCCCC |
| | | GTGACCAAGAGCTTCAACAGGGGCGAGTGC |
| Etrolizumab | Heavy/ | GAGGTGCAGCTGGTGGAGAGCGGCGGCGGCCTGGTGCAGCCCGGCGGCAGCC |
| | SEQ ID | TGAGGCTGAGCTGCGCCGCCAGCGGCTTCTTCATCACCAACAACTACTGGGG |
| | NO: 135 | CTGGGTGAGGCAGGCCCCCGGCAAGGGCCTGGAGTGGGTGGGCTACATCAGC |
| | | TACAGCGGCAGCACCAGCTACAACCCCAGCCTGAAGAGCAGGTTCACCATCA |
| | | GCAGGGACACCAGCAAGAACACCTTCTACCTGCAGATGAACAGCCTGAGGGC |
| | | CGAGGACACCGCCGTGTACTACTGCGCCAGGACCGGCAGCAGCGGCTACTTC |
| | | GACTTCTGGGGCCAGGGCACCCTGGTGACCGTGAGCAGCGCCAGCACCAAGG |
| | | GCCCCAGCGTGTTCCCCCTGGCCCCCAGCAGCAAGAGCACCAGCGGCGGCAC |
| | | CGCCGCCCTGGGCTGCCTGGTGAAGGACTACTTCCCCGAGCCCGTGACCGTG |
| | | AGCTGGAACAGCGGCGCCCTGACCAGCGGCGTGCACACCTTCCCCGCCGTGC |
| | | TGCAGAGCAGCGGCCTGTACAGCCTGAGCAGCGTGGTGACCGTGCCCAGCAG |
| | | CAGCCTGGGCACCCAGACCTACATCTGCAACGTGAACCACAAGCCCAGCAAC |
| | | ACCAAGGTGGACAAGAAGGTGGAGCCCAAGAGCTGCGAC +/− |
| | | AAGACCCACACC (or AAGACCCACCTG) +/− |
| | | TGCCCCCCCTGCCCCGCC +/− CCCGAGCTGCTGGGCGGCCCCAGCGTGT |
| | | TCCTG |
| Etrolizumab | Light/ | GACATCCAGATGACCCAGAGCCCCAGCAGCCTGAGCGCCAGCGTGGGCGACA |
| | SEQ ID | GGGTGACCATCACCTGCAGGGCCAGCGAGAGCGTGGACGACCTGCTGCACTG |
| | NO: 136 | GTACCAGCAGAAGCCCGGCAAGGCCCCCAAGCTGCTGATCAAGTACGCCAGC |
| | | CAGAGCATCAGCGGCGTGCCCAGCAGGTTCAGCGGCAGCGGCAGCGGCACCG |
| | | ACTTCACCCTGACCATCAGCAGCCTGCAGCCCGAGGACTTCGCCACCTACTA |
| | | CTGCCAGCAGGGCAACAGCCTGCCCAACACCTTCGGCCAGGGCACCAAGGTG |
| | | GAGATCAAGAGGACCGTGGCCGCCCCCAGCGTGTTCATCTTCCCCCCCAGCG |
| | | ACGAGCAGCTGAAGAGCGGCACCGCCAGCGTGGTGTGCCTGCTGAACAACTT |
| | | CTACCCCAGGGAGGCCAAGGTGCAGTGGAAGGTGGACAACGCCCTGCAGAGC |
| | | GGCAACAGCCAGGAGAGCGTGACCGAGCAGGACAGCAAGGACAGCACCTACA |
| | | GCCTGAGCAGCACCCTGACCCTGAGCAAGGCCGACTACGAGAAGCACAAGGT |
| | | GTACGCCTGCGAGGTGACCCACCAGGGCCTGAGCAGCCCCGTGACCAAGAGC |
| | | TTCAACAGGGGCGAGTGC |
| Romosozumab | Heavy/ | GAGGTGCAGCTGGTGCAGAGCGGCGCCGAGGTGAAGAAGCCCGGCGCCAGCG |
| | SEQ ID | TGAAGGTGAGCTGCAAGGCCAGCGGCTACACCTTCACCGACTACAACATGCA |
| | NO: 137 | CTGGGTGAGGCAGGCCCCCGGCCAGGGCCTGGAGTGGATGGGCGAGATCAAC |
| | | CCCAACAGCGGCGGCGCCGGCTACAACCAGAAGTTCAAGGGCAGGGTGACCA |
| | | TGACCACCGACACCAGCACCAGCACCGCCTACATGGAGCTGAGGAGCCTGAG |
| | | GAGCGACGACACCGCCGTGTACTACTGCGCCAGGCTGGGCTACGACGACATC |
| | | TACGACGACTGGTACTTCGACGTGTGGGGCCAGGGCACCACCGTGACCGTGA |
| | | GCAGCGCCAGCACCAAGGGCCCCAGCGTGTTCCCCCTGGCCCCCTGCAGCAG |
| | | GAGCACCAGCGAGAGCACCGCCGCCCTGGGCTGCCTGGTGAAGGACTACTTC |
| | | CCCGAGCCCGTGACCGTGAGCTGGAACAGCGGCGCCCTGACCAGCGGCGTGC |
| | | ACACCTTCCCCGCCGTGCTGCAGAGCAGCGGCCTGTACAGCCTGAGCAGCGT |
| | | GGTGACCGTGCCCAGCAGCAACTTCGGCACCCAGACCTACACCTGCAACGTG |
| | | GACCACAAGCCCAGCAACACCAAGGTGGACAAGACCGTGGAGAGGAAGTGCT |
| | | GCGTGGAG +/− TGCCCCCCCTGCCCCGCC +/− CCCCCCGTGGCCGGC |
| Romosozumab | Light/ | GACATCCAGATGACCCAGAGCCCCAGCAGCCTGAGCGCCAGCGTGGGCGACA |
| | SEQ ID | GGGTGACCATCACCTGCAGGGCCAGCCAGGACATCAGCAACTACCTGAACTG |
| | NO: 138 | GTACCAGCAGAAGCCCGGCAAGGCCCCCAAGCTGCTGATCTACTACACCAGC |
| | | AGGCTGCTGAGCGGCGTGCCCAGCAGGTTCAGCGGCAGCGGCAGCGGCACCG |
| | | ACTTCACCCTGACCATCAGCAGCCTGCAGCCCGAGGACTTCGCCACCTACTA |
| | | CTGCCAGCAGGGCGACACCCTGCCCTACACCTTCGGCGGCGGCACCAAGGTG |
| | | GAGATCAAGAGGACCGTGGCCGCCCCCAGCGTGTTCATCTTCCCCCCCAGCG |
| | | ACGAGCAGCTGAAGAGCGGCACCGCCAGCGTGGTGTGCCTGCTGAACAACTT |
| | | CTACCCCAGGGAGGCCAAGGTGCAGTGGAAGGTGGACAACGCCCTGCAGAGC |
| | | GGCAACAGCCAGGAGAGCGTGACCGAGCAGGACAGCAAGGACAGCACCTACA |
| | | GCCTGAGCAGCACCCTGACCCTGAGCAAGGCCGACTACGAGAAGCACAAGGT |
| | | GTACGCCTGCGAGGTGACCCACCAGGGCCTGAGCAGCCCCGTGACCAAGAGC |
| | | TTCAACAGGGGCGAGTGC |
| Lanadelumab | Heavy/ | GAGGTGCAGCTGCTGGAGAGCGGCGGCGGCCTGGTGCAGCCCGGCGGCAGCC |
| | SEQ ID | TGAGGCTGAGCTGCGCCGCCAGCGGCTTCACCTTCAGCCACTACATCATGAT |
| | NO: 139 | GTGGGTGAGGCAGGCCCCCGGCAAGGGCCTGGAGTGGGTGAGCGGCATCTAC |
| | | AGCAGCGGCGGCATCACCGTGTACGCCGACAGCGTGAAGGGCAGGTTCACCA |
| | | TCAGCAGGGACAACAGCAAGAACACCCTGTACCTGCAGATGAACAGCCTGAG |
| | | GGCCGAGGACACCGCCGTGTACTACTGCGCCTACAGGAGGATCGGCGTGCCC |
| | | AGGAGGGACGAGTTCGACATCTGGGGCCAGGGCACCATGGTGACCGTGAGCA |
| | | GCGCCAGCACCAAGGGCCCCAGCGTGTTCCCCCTGGCCCCCAGCAGCAAGAG |
| | | CACCAGCGGCGGCACCGCCGCCCTGGGCTGCCTGGTGAAGGACTACTTCCCC |
| | | GAGCCCGTGACCGTGAGCTGGAACAGCGGCGCCCTGACCAGCGGCGTGCACA |
| | | CCTTCCCCGCCGTGCTGCAGAGCAGCGGCCTGTACAGCCTGAGCAGCGTGGT |
| | | GACCGTGCCCAGCAGCAGCCTGGGCACCCAGACCTACATCTGCAACGTGAAC |
| | | CACAAGCCCAGCAACACCAAGGTGGACAAGAGGGTGGAGCCCAAGAGCTGCG |
| | | AC +/− AAGACCCACACC (or AAGACCCACCTG) +/− |
| | | TGCCCCCCCTGCCCCGCC +/− CCCGAGCTGCTGGGCGGCCCCAGCGTGT |
| | | TCCTG |
| Lanadelumab | Light/ | GACATCCAGATGACCCAGAGCCCCAGCACCCTGAGCGCCAGCGTGGGCGACA |
| | SEQ ID | GGGTGACCATCACCTGCAGGGCCAGCCAGAGCATCAGCAGCTGGCTGGCCTG |
| | NO: 140 | GTACCAGCAGAAGCCCGGCAAGGCCCCCAAGCTGCTGATCTACAAGGCCAGC |
| | | ACCCTGGAGAGCGGCGTGCCCAGCAGGTTCAGCGGCAGCGGCAGCGGCACCG |
| | | AGTTCACCCTGACCATCAGCAGCCTGCAGCCCGACGACTTCGCCACCTACTA |
| | | CTGCCAGCAGTACAACACCTACTGGACCTTCGGCCAGGGCACCAAGGTGGAG |
| | | ATCAAGAGGACCGTGGCCGCCCCCAGCGTGTTCATCTTCCCCCCCAGCGACG |
| | | AGCAGCTGAAGAGCGGCACCGCCAGCGTGGTGTGCCTGCTGAACAACTTCTA |
| | | CCCCAGGGAGGCCAAGGTGCAGTGGAAGGTGGACAACGCCCTGCAGAGCGGC |
| | | AACAGCCAGGAGAGCGTGACCGAGCAGGACAGCAAGGACAGCACCTACAGCC |
| | | TGAGCAGCACCCTGACCCTGAGCAAGGCCGACTACGAGAAGCACAAGGTGTA |
| | | CGCCTGCGAGGTGACCCACCAGGGCCTGAGCAGCCCCGTGACCAAGAGCTTC |
| | | AACAGGGGCGAGTGC |
| Lanadelumab | Light/ | ATGTACCGGATGCAGCTGCTGCTGCTCATTGCCCTGTCTCTGGCCCTGGTCA |
| L01 | SEQ ID | CCAATAGCGAAGTCCAGCTGCTGGAATCTGGCGGCGGACTTGTTCAACCTGG |
| | NO: 141 | CGGCTCTCTGAGACTGAGCTGTGCCGCTTCCGGCTTCACCTTCAGCCACTAT |
| | | ATCATGATGTGGGTCCGACAGGCCCCTGGCAAAGGCCTTGAATGGGTGTCCG |
| | | GCATCTATAGCAGCGGCGGCATCACAGTGTACGCCGACTCTGTGAAGGGCAG |
| | | ATTCACCATCAGCCGGGACAACAGCAAGAACACCCTGTACCTGCAGATGAAC |
| | | AGCCTGAGAGCCGAGGACACCGCCGTGTACTACTGCGCCTATAGAAGAATCG |
| | | GCGTGCCCAGACGGGACGAGTTCGATATTTGGGGCCAGGGCACCATGGTCAC |
| | | CGTGTCTAGCGCCTCTACAAAGGGCCCTAGCGTGTTCCCTCTGGCTCCTAGC |
| | | AGCAAGAGCACAAGCGGAGGAACAGCCGCTCTGGGCTGTCTGGTCAAGGACT |
| | | ACTTTCCCGAGCCTGTGACCGTGTCCTGGAATAGCGGAGCACTGACAAGCGG |
| | | CGTGCACACCTTTCCAGCTGTGCTGCAAAGCAGCGGCCTGTACTCTCTGAGC |
| | | AGCGTGGTCACAGTGCCAAGCTCTAGCCTGGGCACCCAGACCTACATCTGCA |
| | | ATGTGAACCACAAGCCTAGCAACACCAAGGTGGACAAGAGAGTGGAACCCAA |
| | | GAGCTGCGACAAGACCCACACCTGTCCTCCATGTCCTGCTCCAGAACTGCTC |
| | | GGCGGACCTTCCGTGTTCCTGTTTCCTCCAAAGCCTAAGGACACCCTGATGA |
| | | TCAGCAGAACCCCTGAAGTGACCTGCGTGGTGGTGGATGTGTCCCACGAGGA |
| | | TCCCGAAGTGAAGTTCAATTGGTACGTGGACGGCGTGGAAGTGCACAACGCC |
| | | AAGACCAAGCCTAGAGAGGAACAGTACAACAGCACCTACAGAGTGGTGTCCG |
| | | TGCTGACCGTGCTGCACCAGGATTGGCTGAACGGCAAAGAGTACAAGTGCAA |
| | | GGTGTCCAACAAGGCCCTGCCTGCTCCTATCGAGAAAACCATCAGCAAGGCC |
| | | AAGGGCCAGCCTAGGGAACCCCAGGTTTACACACTGCCTCCAAGCCGGGAAG |
| | | AGATGACCAAGAACCAGGTGTCCCTGACCTGCCTCGTGAAGGGCTTCTACCC |
| | | TTCCGATATCGCCGTGGAATGGGAGAGCAATGGCCAGCCAGAGAACAACTAC |
| | | AAGACAACCCCTCCTGTGCTGGACAGCGACGGCTCATTCTTCCTGTACAGCA |
| | | AGCTGACAGTGGACAAGTCCAGATGGCAGCAGGGCAACGTGTTCAGCTGCAG |
| | | CGTGATGCACGAGGCCCTGCACAACCACTACACCCAGAAGAGTCTGAGCCTG |
| | | TCTCCAGGCCTGCGGAAGAGAAGGGCTCCTGTGAAGCAGACCCTGAACTTCG |
| | | ACCTGCTGAAACTGGCCGGCGACGTGGAAAGCAACCCCGGACCTATGTATAG |
| | | AATGCAGCTCCTCCTGCTGATCGCACTGAGCCTGGCTCTCGTGACCAACAGC |
| | | GACATCCAGATGACACAGAGCCCCAGCACACTGTCTGCCAGCGTGGGAGACA |
| | | GAGTGACCATCACCTGTAGAGCCAGCCAGTCCATCTCCTCTTGGCTGGCCTG |
| | | GTATCAGCAAAAGCCTGGCAAGGCCCCTAAGCTGCTGATCTACAAGGCCTCC |
| | | ACACTGGAAAGCGGGGTGCCCTCCAGATTTTCTGGCAGCGGATCTGGCACCG |
| | | AGTTCACCCTGACCATCAGTAGCCTGCAGCCTGACGACTTCGCCACCTACTA |
| | | CTGCCAGCAGTACAATACCTACTGGACCTTCGGCCAGGGAACAAAGGTGGAA |
| | | ATCAAGCGGACTGTGGCCGCTCCAAGCGTGTTCATCTTTCCACCTAGCGACG |
| | | AGCAGCTGAAGTCCGGCACAGCCTCTGTTGTGTGCCTGCTGAACAACTTCTA |
| | | CCCCAGAGAAGCCAAGGTGCAGTGGAAAGTGGACAATGCCCTGCAGAGCGGC |
| | | AACTCCCAAGAGAGCGTGACAGAGCAGGACTCCAAGGATTCCACCTACAGCC |
| | | TGTCTAGCACCCTGACACTGAGCAAGGCCGACTACGAGAAGCACAAAGTGTA |
| | | TGCCTGCGAAGTGACCCACCAGGGCCTTAGCTCTCCAGTGACCAAGAGCTTC |
| | | AACCGGGGCGAGTGTTGATAA |
| Siltuximab | Heavy/ | gaagtgcagctggtggaaagcggcggcaaactgctgaaaccgggcggcagcc |
| | SEQ ID | tgaaactgagctgcgcggcgagcggctttacctttagcagctttgcgatgag |
| | NO: 343 | ctggtttcgccagagcccggaaaaacgcctggaatgggtggcggaaattagc |
| | | agcggcggcagctatacctattatccggataccgtgaccggccgctttacca |
| | | ttagccgcgataacgcgaaaaacaccctgtatctggaaatgagcagcctgcg |
| | | cagcgaagataccgcgatgtattattgcgcgcgcggcctgtggggctattat |
| | | gcgctggattattggggccagggcaccagcgtgaccgtgagcagcgcgagca |
| | | ccaaaggcccgagcgtgtttccgctggcgccgagcagcaaaagcaccagcgg |
| | | cggcaccgcggcgctgggctgcctggtgaaagattattttccggaaccggtg |
| | | accgtgagctggaacagcggcgcgctgaccagcggcgtgcatacctttccgg |
| | | cggtgctgcagagcagcggcctgtatagcctgagcagcgtggtgaccgtgcc |
| | | gagcagcagcctgggcacccagacctatatttgcaacgtgaaccataaaccg |
| | | agcaacaccaaagtggataaaaaagtggaaccgaaaagctgcgat |
| | | +/− AAGACCCACACC (or AAGACCCACCTG) +/− |
| | | TGCCCCCCCTGCCCCGCC +/− |
| | | CCCGAGCTGCTGGGCGGCCCCAGCGTGTTCCTG |
| Siltuximab | Light/ | cagattgtgctgattcagagcccggcgattatgagcgcgagcccgggcgaaa |
| | SEQ ID | aagtgaccatgacctgcagcgcgagcagcagcgtgagctatatgtattggta |
| | NO: 344 | tcagcagaaaccgggcagcagcccgcgcctgctgatttatgataccagcaac |
| | | ctggcgagcggcgtgccggtgcgctttagcggcagcggcagcggcaccagct |
| | | atagcctgaccattagccgcatggaagcggaagatgcggcgacctattattg |
| | | ccagcagtggagcggctatccgtatacctttggcggcggcaccaaactggaa |
| | | attaaacgcaccgtggcggcgccgagcgtgtttatttttccgccgagcgatg |
| | | aacagctgaaaagcggcaccgcgagcgtggtgtgcctgctgaacaactttta |
| | | tccgcgcgaagcgaaagtgcagtggaaagtggataacgcgctgcagagcggc |
| | | aacagccaggaaagcgtgaccgaacaggatagcaaagatagcacctatagcc |
| | | tgagcagcaccctgaccctgagcaaagcggattatgaaaaacataaagtgta |
| | | tgcgtgcgaagtgacccatcagggcctgagcagcccggtgaccaaaagcttt |
| | | aaccgcggcgaatgc |
| Clazakizumab | Heavy/ | gaagtgcagctggtggaaagcggcggcggcctggtgcagccgggcggcagcc |
| | SEQ ID | tgcgcctgagctgcgcggcgagcggctttagcctgagcaactattatgtgac |
| | NO: 345 | ctgggtgcgccaggcgccgggcaaaggcctggaatgggtgggcattatttat |
| | | ggcagcgatgaaaccgcgtatgcgaccagcgcgattggccgctttaccatta |
| | | gccgcgataacagcaaaaacaccctgtatctgcagatgaacagcctgcgcgc |
| | | ggaagataccgcggtgtattattgcgcgcgcgatgatagcagcgattgggat |
| | | gcgaaatttaacctgtggggccagggcaccctggtgaccgtgagcagcgcga |
| | | gcaccaaaggcccgagcgtgtttccgctggcgccgagcagcaaaagcaccag |
| | | cggcggcaccgcggcgctgggctgcctggtgaaagattattttccggaaccg |
| | | gtgaccgtgagctggaacagcggcgcgctgaccagcggcgtgcatacctttc |
| | | cggcggtgctgcagagcagcggcctgtatagcctgagcagcgtggtgaccgt |
| | | gccgagcagcagcctgggcacccagacctatatttgcaacgtgaaccataaa |
| | | ccgagcaacaccaaagtggataaacgcgtggaaccgaaaagctgcgat |
| | | +/− AAGACCCACACC (or AAGACCCACCTG) +/− |
| | | TGCCCCCCCTGCCCCGCC +/− |
| | | CCCGAGCTGCTGGGCGGCCCCAGCGTGTTCCTG |
| Clazakizumab | Light/ | gcgattcagatgacccagagcccgagcagcctgagcgcgagcgtgggcgatc |
| | SEQ ID | gcgtgaccattacctgccaggcgagccagagcattaacaacgaactgagctg |
| | NO: 346 | gtatcagcagaaaccgggcaaagcgccgaaactgctgatttatcgcgcgagc |
| | | accctggcgagcggcgtgccgagccgctttagcggcagcggcagcggcaccg |
| | | attttaccctgaccattagcagcctgcagccggatgattttgcgacctatta |
| | | ttgccagcagggctatagcctgcgcaacattgataacgcgtttggcggcggc |
| | | accaaagtggaaattaaacgcaccgtggcggcgccgagcgtgtttatttttc |
| | | cgccgagcgatgaacagctgaaaagcggcaccgcgagcgtggtgtgcctgct |
| | | gaacaacttttatccgcgcgaagcgaaagtgcagtggaaagtggataacgcg |
| | | ctgcagagcggcaacagccaggaaagcgtgaccgaacaggatagcaaagata |
| | | gcacctatagcctgagcagcaccctgaccctgagcaaagcggattatgaaaa |
| | | acataaagtgtatgcgtgcgaagtgacccatcagggcctgagcagcccggtg |
| | | accaaaagctttaaccgcggcgaatgcgaaccgaaaagctgcgat |
| | | +/− AAGACCCACACC (or AAGACCCACCTG) +/− |
| | | TGCCCCCCCTGCCCCGCC +/− |
| | | CCCGAGCTGCTGGGCGGCCCCAGCGTGTTCCTG |
| Sirukumab | Heavy/ | Gaagtgcagctggtggaaagcggcggcggcctggtgcagccgggcggcagcc |
| | SEQ ID | tgcgcctgagctgcgcggcgagcggctttacctttagcccgtttgcgatgag |
| | NO: 347 | ctgggtgcgccaggcgccgggcaaaggcctggaatgggtggcgaaaattagc |
| | | ccgggcggcagctggacctattatagcgataccgtgaccggccgctttacca |
| | | ttagccgcgataacgcgaaaaacagcctgtatctgcagatgaacagcctgcg |
| | | cgcggaagataccgcggtgtattattgcgcgcgccagctgtggggctattat |
| | | gcgctggatatttggggccagggcaccaccgtgaccgtgagcagcgcgagca |
| | | ccaaaggcccgagcgtgtttccgctggcgccgagcagcaaaagcaccagcgg |
| | | cggcaccgcggcgctgggctgcctggtgaaagattattttccggaaccggtg |
| | | accgtgagctggaacagcggcgcgctgaccagcggcgtgcatacctttccgg |
| | | cggtgctgcagagcagcggcctgtatagcctgagcagcgtggtgaccgtgcc |
| | | gagcagcagcctgggcacccagacctatatttgcaacgtgaaccataaaccg |
| | | agcaacaccaaagtggataaaaaagtggaaccgaaaagctgcgat |
| | | +/− AAGACCCACACC (or AAGACCCACCTG) +/− |
| | | TGCCCCCCCTGCCCCGCC +/− |
| | | CCCGAGCTGCTGGGCGGCCCCAGCGTGTTCCTG |
| Sirukumab | Light/ | gaaattgtgctgacccagagcccggcgaccctgagcctgagcccgggcgaac |
| | SEQ ID | gcgcgaccctgagctgcagcgcgagcattagcgtgagctatatgtattggta |
| | NO: 348 | tcagcagaaaccgggccaggcgccgcgcctgctgatttatgatatgagcaac |
| | | ctggcgagcggcattccggcgcgctttagcggcagcggcagcggcaccgatt |
| | | ttaccctgaccattagcagcctggaaccggaagattttgcggtgtattattg |
| | | catgcagtggagcggctatccgtatacctttggcggcggcaccaaagtggaa |
| | | attaaacgcaccgtggcggcgccgagcgtgtttatttttccgccgagcgatg |
| | | aacagctgaaaagcggcaccgcgagcgtggtgtgcctgctgaacaactttta |
| | | tccgcgcgaagcgaaagtgcagtggaaagtggataacgcgctgcagagcggc |
| | | aacagccaggaaagcgtgaccgaacaggatagcaaagatagcacctatagcc |
| | | tgagcagcaccctgaccctgagcaaagcggattatgaaaaacataaagtgta |
| | | tgcgtgcgaagtgacccatcagggcctgagcagcccggtgaccaaaagcttt |
| | | aaccgcggcgaatgc |
| Olokizumab | Heavy/ | Gaagtgcagctggtggaaagcggcggcggcctggtgcagccgggcggcagcc |
| | SEQ ID | tgcgcctgagctgcgcggcgagcggctttaactttaacgattattttatgaa |
| | NO: 349 | ctgggtgcgccaggcgccgggcaaaggcctggaatgggtggcgcagatgcgc |
| | | aacaaaaactatcagtatggcacctattatgcggaaagcctggaaggccgct |
| | | ttaccattagccgcgatgatagcaaaaacagcctgtatctgcagatgaacag |
| | | cctgaaaaccgaagataccgcggtgtattattgcgcgcgcgaaagctattat |
| | | ggctttaccagctattggggccagggcaccctggtgaccgtgagcagcgcga |
| | | gcaccaaaggcccgagcgtgtttccgctggcgccgtgcagccgcagcaccag |
| | | cgaaagcaccgcggcgctgggctgcctggtgaaagattattttccggaaccg |
| | | gtgaccgtgagctggaacagcggcgcgctgaccagcggcgtgcatacctttc |
| | | cggcggtgctgcagagcagcggcctgtatagcctgagcagcgtggtgaccgt |
| | | gccgagcagcagcctgggcaccaaaacctatacctgcaacgtggatcataaa |
| | | ccgagcaacaccaaagtggataaacgcgtgGAGAGCAAGTAC +/− |
| | | GGCCCCCCCTGCCCCCCCTGCCCCGCC |
| | | (GGCCCCCCCTGCCCCAGCTGCCCCGCC) +/− |
| | | CCCGAGTTCCTGGGCGGCCCCAGCGTGTTCCTG |
| Olokizumab | Light/ | gatattcagatgacccagagcccgagcagcctgagcgcgagcgtgggcgatc |
| | SEQ ID | gcgtgaccattacctgccaggcgagccaggatattggcattagcctgagctg |
| | NO: 350 | gtatcagcagaaaccgggcaaagcgccgaaactgctgatttataacgcgaac |
| | | aacctggcggatggcgtgccgagccgctttagcggcagcggcagcggcaccg |
| | | attttaccctgaccattagcagcctgcagccggaagattttgcgacctatta |
| | | ttgcctgcagcataacagcgcgccgtatacctttggccagggcaccaaactg |
| | | gaaattaaacgcaccgtggcggcgccgagcgtgtttatttttccgccgagcg |
| | | atgaacagctgaaaagcggcaccgcgagcgtggtgtgcctgctgaacaactt |
| | | ttatccgcgcgaagcgaaagtgcagtggaaagtggataacgcgctgcagagc |
| | | ggcaacagccaggaaagcgtgaccgaacaggatagcaaagatagcacctata |
| | | gcctgagcagcaccctgaccctgagcaaagcggattatgaaaaacataaagt |
| | | gtatgcgtgcgaagtgacccatcagggcctgagcagcccggtgaccaaaagc |
| | | tttaaccgcggcgaatgc |
| Gerilimzumab | Heavy/ | Gaagtgcagctgcaggaaagcggcccgggcctggtgaaaccgagccagaccc |
| | SEQ ID | tgagcctgacctgcaccgtgagcggcggcagcattaccagccgctattatgc |
| | NO: 351 | gtggagctggattcgccagccgccgggcaaaggcctggaatggattggcgtg |
| | | attgattatgatggcgatacctattatagcccgagcctgaaaagccgcgtga |
| | | gcattagctgggataccagcaaaaaccagtttagcctgaaactgagcagcgt |
| | | gacccoggcggataccgcggtgtattattgcgcgcgcgatccggatgtggtg |
| | | accggctttcattatgattattggggccagggcaccatggtgaccgtgagca |
| | | gcgcgagcaccaaaggcccgagcgtgtttccgctggcgccgagcagcaaaag |
| | | caccagcggcggcaccgcggcgctgggctgcctggtgaaagattattttccg |
| | | gaaccggtgaccgtgagctggaacagcggcgcgctgaccagcggcgtgcata |
| | | cctttccggcggtgctgcagagcagcggcctgtatagcctgagcagcgtggt |
| | | gaccgtgccgagcagcagcctgggcacccagacctatatttgcaacgtgaac |
| | | cataaaccgagcaacaccaaagtggataaaaaagtggaaccgaaaagctgcg |
| | | at +/− AAGACCCACACC (or AAGACCCACCTG) +/− |
| | | TGCCCCCCCTGCCCCGCC +/− |
| | | CCCGAGCTGCTGGGCGGCCCCAGCGTGTTCCTG |
| Gerilimzumab | Light/ | cagagcgcgctgacccagccgccgagcgtgagcggcaccccgggccagagcg |
| | SEQ ID | tgaccattagctgcgcgggcgcgaacaacgatattggcacctatgcgtatgt |
| | NO: 352 | gagctggtatcagcagctgccgggcaccgcgccgaaactgatgatttataaa |
| | | gtgaccacccgcgcgagcggcattccggatcgctttagcggcagcaaaagcg |
| | | gcaacaccgcgagcctgaccattagcggcctgcaggcggaagatgaagcgga |
| | | ttattattgcgcgagctatcgcaactttaacaacgcggtgtttggcaccggc |
| | | accaaactgaccgtgctgggccagccgaaagcggcgccgagcgtgaccctgt |
| | | ttccgccgagcagcgaagaactgcaggcgaacaaagcgaccctggtgtgcct |
| | | gattagcgatttttatccgggcgcggtgaccgtggcgtggaaagcggatagc |
| | | agcccggtgaaagcgggcgtggaaaccaccaccccgagcaaacagagcaaca |
| | | acaaatatgcggcgagcagctatctgagcctgaccccggaacagtggaaaag |
| | | ccatcgcagctatagctgccaggtgacccatgaaggcagcaccgtggaaaaa |
| | | accgtggcgccgaccgaatgcagc |
| Tocilizumab | Heavy/ | Caggtgcagctgcaggaaagcggcccgggcctggtgcgcccgagccagaccc |
| | SEQ ID | tgagcctgacctgcaccgtgagcggctatagcattaccagcgatcatgcgtg |
| | NO: 353 | gagctgggtgcgccagccgccgggccgcggcctggaatggattggctatatt |
| | | agctatagcggcattaccacctataacccgagcctgaaaagccgcgtgacca |
| | | tgctgcgcgataccagcaaaaaccagtttagcctgcgcctgagcagcgtgac |
| | | cgcggcggataccgcggtgtattattgcgcgcgcagcctggcgcgcaccacc |
| | | gcgatggattattggggccagggcagcctggtgaccgtgagcagcgcgagca |
| | | ccaaaggcccgagcgtgtttccgctggcgccgagcagcaaaagcaccagcgg |
| | | cggcaccgoggcgctgggctgcctggtgaaagattattttccggaaccggtg |
| | | accgtgagctggaacagcggcgcgctgaccagcggcgtgcatacctttccgg |
| | | cggtgctgcagagcagcggcctgtatagcctgagcagcgtggtgaccgtgcc |
| | | gagcagcagcctgggcacccagacctatatttgcaacgtgaaccataaaccg |
| | | agcaacaccaaagtggataaaaaagtggaaccgaaaagctgcgat +/− |
| | | AAGACCCACACC (or AAGACCCACCTG) +/− |
| | | TGCCCCCCCTGCCCCGCC +/− |
| | | CCCGAGCTGCTGGGCGGCCCCAGCGTGTTCCTG |
| Tocilizumab | Light/ | gatattcagatgacccagagcccgagcagcctgagcgcgagcgtgggcgatc |
| | SEQ ID | gcgtgaccattacctgccgcgcgagccaggatattagcagctatctgaactg |
| | NO: 354 | gtatcagcagaaaccgggcaaagcgccgaaactgctgatttattataccagc |
| | | cgcctgcatagcggcgtgccgagccgctttagcggcagcggcagcggcaccg |
| | | attttacctttaccattagcagcctgcagccggaagatattgcgacctatta |
| | | ttgccagcagggcaacaccctgccgtatacctttggccagggcaccaaagtg |
| | | gaaattaaacgcaccgtggcggcgccgagcgtgtttatttttccgccgagcg |
| | | atgaacagctgaaaagcggcaccgcgagcgtggtgtgcctgctgaacaactt |
| | | ttatccgcgcgaagcgaaagtgcagtggaaagtggataacgcgctgcagagc |
| | | ggcaacagccaggaaagcgtgaccgaacaggatagcaaagatagcacctata |
| | | gcctgagcagcaccctgaccctgagcaaagcggattatgaaaaacataaagt |
| | | gtatgcgtgcgaagtgacccatcagggcctgagcagcccggtgaccaaaagc |
| | | tttaaccgcggcgaatgc |
| Lecanemab | Heavy/ | Gaagtgcagctggtggaaagcggcggcggcctggtgcagccgggcggcagcc |
| | SEQ ID | tgcgcctgagctgcagcgcgagcggctttacctttagcagctttggcatgca |
| | NO: 376 | ttgggtgcgccaggcgccgggcaaaggcctggaatgggtggcgtatattagc |
| | | agcggcagcagcaccatttattatggcgataccgtgaaaggccgctttacca |
| | | ttagccgcgataacgcgaaaaacagcctgtttctgcagatgagcagcctgcg |
| | | cgcggaagataccgcggtgtattattgcgcgcgcgaaggcggctattattat |
| | | ggccgcagctattataccatggattattggggccagggcaccaccgtgaccg |
| | | tgagcagcgcgagcaccaaaggcccgagcgtgtttccgctggcgccgagcag |
| | | caaaagcaccagcggcggcaccgcggcgctgggctgcctggtgaaagattat |
| | | tttccggaaccggtgaccgtgagctggaacagcggcgcgctgaccagcggcg |
| | | tgcatacctttccggcggtgctgcagagcagcggcctgtatagcctgagcag |
| | | cgtggtgaccgtgccgagcagcagcctgggcacccagacctatatttgcaac |
| | | gtgaaccataaaccgagcaacaccaaagtggataaacgcgtggaaccgaaaa |
| | | gctgcgat +/− AAGACCCACACC (or AAGACCCACCTG) +/− |
| | | TGCCCCCCCTGCCCCGCC +/− |
| | | CCCGAGCTGGCCGGCGCCCCCAGCGTGTTCCTG |
| Lecanemab | Light/ | Gatgtggtgatgacccagagcccgctgagcctgccggtgaccccgggcgcgc |
| | SEQ ID | cggcgagcattagctgccgcagcagccagagcattgtgcatagcaacggcaa |
| | NO: 377 | cacctatctggaatggtatctgcagaaaccgggccagagcccgaaactgctg |
| | | atttataaagtgagcaaccgctttagcggcgtgccggatcgctttagcggca |
| | | gcggcagcggcaccgattttaccctgcgcattagccgcgtggaagcggaaga |
| | | tgtgggcatttattattgctttcagggcagccatgtgccgccgacctttggc |
| | | ccgggcaccaaactggaaattaaacgcaccgtggcggcgccgagcgtgttta |
| | | tttttccgccgagcgatgaacagctgaaaagcggcaccgcgagcgtggtgtg |
| | | cctgctgaacaacttttatccgcgcgaagcgaaagtgcagtggaaagtggat |
| | | aacgcgctgcagagcggcaacagccaggaaagcgtgaccgaacaggatagca |
| | | aagatagcacctatagcctgagcagcaccctgaccctgagcaaagcggatta |
| | | tgaaaaacataaagtgtatgcgtgcgaagtgacccatcagggcctgagcagc |
| | | ccggtgaccaaaagctttaaccgcggcgaatgc |
| Ravulizumab | Heavy/ | caggtgcagctggtgcagagcggcgcggaagtgaaaaaaccgggcgcgagcg |
| | SEQ ID | tgaaagtgagctgcaaagcgagcggccatatttttagcaactattggattca |
| | NO: 378 | gtgggtgcgccaggcgccgggccagggcctggaatggatgggcgaaattctg |
| | | ccgggcagcggccataccgaatataccgaaaactttaaagatcgcgtgacca |
| | | tgacccgcgataccagcaccagcaccgtgtatatggaactgagcagcctgcg |
| | | cagcgaagataccgcggtgtattattgcgcgcgctatttttttggcagcagc |
| | | ccgaactggtattttgatgtgtggggccagggcaccctggtgaccgtgagca |
| | | gcgcgagcaccaaaggcccgagcgtgtttccgctggcgccgtgcagccgcag |
| | | caccagcgaaagcaccgcggcgctgggctgcctggtgaaagattattttccg |
| | | gaaccggtgaccgtgagctggaacagcggcgcgctgaccagcggcgtgcata |
| | | cctttccggcggtgctgcagagcagcggcctgtatagcctgagcagcgtggt |
| | | gaccgtgccgagcagcaactttggcacccagacctatacctgcaacgtggat |
| | | cataaaccgagcaacaccaaagtggataaaaccgtggaacgcaaatgctgcg |
| | | tggaa +/− TGCCCCCCCTGCCCCGCC +/− CCCCCCGTGGCCGGC |
| Ravulizumab | Light/ | Gatattcagatgacccagagcccgagcagcctgagcgcgagcgtgggcgatc |
| | SEQ ID | gcgtgaccattacctgcggcgcgagcgaaaacatttatggcgcgctgaactg |
| | NO: 379 | gtatcagcagaaaccgggcaaagcgccgaaactgctgatttatggcgcgacc |
| | | aacctggcggatggcgtgccgagccgctttagcggcagcggcagcggcaccg |
| | | attttaccctgaccattagcagcctgcagccggaagattttgcgacctatta |
| | | ttgccagaacgtgctgaacaccccgctgacctttggccagggcaccaaagtg |
| | | gaaattaaacgcaccgtggcggcgccgagcgtgtttatttttccgccgagcg |
| | | atgaacagctgaaaagcggcaccgcgagcgtggtgtgcctgctgaacaactt |
| | | ttatccgcgcgaagcgaaagtgcagtggaaagtggataacgcgctgcagagc |
| | | ggcaacagccaggaaagcgtgaccgaacaggatagcaaagatagcacctata |
| | | gcctgagcagcaccctgaccctgagcaaagcggattatgaaaaacataaagt |
| | | gtatgcgtgcgaagtgacccatcagggcctgagcagcccggtgaccaaaagc |
| | | tttaaccgcggcgaatgc |
| Benralizumab | Heavy/ | Gaagtgcagctggtgcagagcggcgcggaagtgaaaaaaccgggcgcgagcg |
| | SEQ ID | tgaaagtgagctgcaaagcgagcggctatacctttaccagctatgtgattca |
| | NO: 380 | ttgggtgcgccagcgcccgggccagggcctggcgtggatgggctatattaac |
| | | ccgtataacgatggcaccaaatataacgaacgctttaaaggcaaagtgacca |
| | | ttaccagcgatcgcagcaccagcaccgtgtatatggaactgagcagcctgcg |
| | | cagcgaagataccgcggtgtatctgtgcggccgcgaaggcattcgctattat |
| | | ggcctgctgggcgattattggggccagggcaccctggtgaccgtgagcagcg |
| | | cgagcaccaaaggcccgagcgtgtttccgctggcgccgagcagcaaaagcac |
| | | cagcggcggcaccgcggcgctgggctgcctggtgaaagattattttccggaa |
| | | ccggtgaccgtgagctggaacagcggcgcgctgaccagcggcgtgcatacct |
| | | ttccggcggtgctgcagagcagcggcctgtatagcctgagcagcgtggtgac |
| | | cgtgccgagcagcagcctgggcacccagacctatatttgcaacgtgaaccat |
| | | aaaccgagcaacaccaaagtggataaaaaagtggaaccgaaaagctgcgat |
| | | +/− AAGACCCACACC (or AAGACCCACCTG) +/− |
| | | TGCCCCCCCTGCCCCGCC +/− |
| | | CCCGAGCTGGCCGGCGCCCCCAGCGTGTTCCTG |
| Benralizumab | Light/ | Gatattcagatgacccagagcccgagcagcctgagcgcgagcgtgggcgatc |
| | SEQ ID | gcgtgaccattacctgcggcaccagcgaagatattattaactatctgaactg |
| | NO: 381 | gtatcagcagaaaccgggcaaagcgccgaaactgctgatttatcataccagc |
| | | cgcctgcagagcggcgtgccgagccgctttagcggcagcggcagcggcaccg |
| | | attttaccctgaccattagcagcctgcagccggaagattttgcgacctatta |
| | | ttgccagcagggctataccctgccgtatacctttggccagggcaccaaagtg |
| | | gaaattaaacgcaccgtggcggcgccgagcgtgtttatttttccgccgagcg |
| | | atgaacagctgaaaagcggcaccgcgagcgtggtgtgcctgctgaacaactt |
| | | ttatccgcgcgaagcgaaagtgcagtggaaagtggataacgcgctgcagagc |
| | | ggcaacagccaggaaagcgtgaccgaacaggatagcaaagatagcacctata |
| | | gcctgagcagcaccctgaccctgagcaaagcggattatgaaaaacataaagt |
| | | gtatgcgtgcgaagtgacccatcagggcctgagcagcccggtgaccaaaagc |
| | | tttaaccgcggcgaatgc |
| Reslizumab | Heavy/ | Gaagtgcagctggtggaaagcggcggcggcctggtgcagccgggcggcagcc |
| | SEQ ID | tgcgcctgagctgcgcggtgagcggcctgagcctgaccagcaacagcgtgaa |
| | NO: 382 | ctggattcgccaggcgccgggcaaaggcctggaatgggtgggcctgatttgg |
| | | agcaacggcgataccgattataacagcgcgattaaaagccgctttaccatta |
| | | gccgcgataccagcaaaagcaccgtgtatctgcagatgaacagcctgcgcgc |
| | | ggaagataccgcggtgtattattgcgcgcgcgaatattatggctattttgat |
| | | tattggggccagggcaccctggtgaccgtgagcagcgcgagcaccaaaggcc |
| | | cgagcgtgtttccgctggcgccgtgcagccgcagcaccagcgaaagcaccgc |
| | | ggcgctgggctgcctggtgaaagattattttccggaaccggtgaccgtgagc |
| | | tggaacagcggcgcgctgaccagcggcgtgcatacctttccggcggtgctgc |
| | | agagcagcggcctgtatagcctgagcagcgtggtgaccgtgccgagcagcag |
| | | cctgggcaccaaaacctatacctgcaacgtggatcataaaccgagcaacacc |
| | | aaagtggataaacgcgtggaaagcaaatatGAGAGCAAGTAC +/− |
| | | GGCCCCCCCTGCCCCCCCTGCCCCGCC |
| | | (GGCCCCCCCTGCCCCAGCTGCCCCGCC) +/− |
| | | CCCGAGTTCCTGGGCGGCCCCAGCGTGTTCCTG |
| Reslizumab | Light/ | Gatattcagatgacccagagcccgagcagcctgagcgcgagcgtgggcgatc |
| | SEQ ID | gcgtgaccattacctgcctggcgagcgaaggcattagcagctatctggcgtg |
| | NO: 383 | gtatcagcagaaaccgggcaaagcgccgaaactgctgatttatggcgcgaac |
| | | agcctgcagaccggcgtgccgagccgctttagcggcagcggcagcgcgaccg |
| | | attataccctgaccattagcagcctgcagccggaagattttgcgacctatta |
| | | ttgccagcagagctataaatttccgaacacctttggccagggcaccaaagtg |
| | | gaagtgaaacgcaccgtggcggcgccgagcgtgtttatttttccgccgagcg |
| | | atgaacagctgaaaagcggcaccgcgagcgtggtgtgcctgctgaacaactt |
| | | ttatccgcgcgaagcgaaagtgcagtggaaagtggataacgcgctgcagagc |
| | | ggcaacagccaggaaagcgtgaccgaacaggatagcaaagatagcacctata |
| | | gcctgagcagcaccctgaccctgagcaaagcggattatgaaaaacataaagt |
| | | gtatgcgtgcgaagtgacccatcagggcctgagcagcccggtgaccaaaagc |
| | | tttaaccgcggcgaatgc |
| Tralokinumab | Heavy/ | Caggtgcagctggtgcagagcggcgcggaagtgaaaaaaccgggcgcgagcg |
| | SEQ ID | tgaaagtgagctgcaaagcgagcggctatacctttaccaactatggcctgag |
| | NO: 384 | ctgggtgcgccaggcgccgggccagggcctggaatggatgggctggattagc |
| | | gcgaacaacggcgataccaactatggccaggaatttcagggccgcgtgacca |
| | | tgaccaccgataccagcaccagcaccgcgtatatggaactgcgcagcctgcg |
| | | cagcgatgataccgcggtgtattattgcgcgcgcgatagcagcagcagctgg |
| | | gcgcgctggttttttgatctgtggggccgcggcaccctggtgaccgtgagca |
| | | gcgcgagcaccaaaggcccgagcgtgtttccgctggcgccgtgcagccgcag |
| | | caccagcgaaagcaccgcggcgctgggctgcctggtgaaagattattttccg |
| | | gaaccggtgaccgtgagctggaacagcggcgcgctgaccagcggcgtgcata |
| | | cctttccggcggtgctgcagagcagcggcctgtatagcctgagcagcgtggt |
| | | gaccgtgccgagcagcagcctgggcaccaaaacctatacctgcaacgtggat |
| | | cataaaccgagcaacaccaaagtggataaacgcgtgGAGAGCAAGTAC |
| | | +/− GGCCCCCCCTGCCCCCCCTGCCCCGCC |
| | | (GGCCCCCCCTGCCCCAGCTGCCCCGCC) +/− |
| | | CCCGAGTTCCTGGGCGGCCCCAGCGTGTTCCTG |
| Tralokinumab | Light/ | Agctatgtgctgacccagccgccgagcgtgagcgtggcgccgggcaaaaccg |
| | SEQ ID | cgcgcattacctgcggcggcaacattattggcagcaaactggtgcattggta |
| | NO: 385 | tcagcagaaaccgggccaggcgccggtgctggtgatttatgatgatggcgat |
| | | cgcccgagcggcattccggaacgctttagcggcagcaacagcggcaacaccg |
| | | cgaccctgaccattagccgcgtggaagcgggcgatgaagcggattattattg |
| | | ccaggtgtgggataccggcagcgatccggtggtgtttggcggcggcaccaaa |
| | | ctgaccgtgctgggccagccgaaagcggcgccgagcgtgaccctgtttccgc |
| | | cgagcagcgaagaactgcaggcgaacaaagcgaccctggtgtgcctgattag |
| | | cgatttttatccgggcgcggtgaccgtggcgtggaaagcggatagcagcccg |
| | | gtgaaagcgggcgtggaaaccaccaccccgagcaaacagagcaacaacaaat |
| | | atgcggcgagcagctatctgagcctgaccccggaacagtggaaaagccatcg |
| | | cagctatagctgccaggtgacccatgaaggcagcaccgtggaaaaaaccgtg |
| | | gcgccgaccgaatgcagc |
| Nemolizumab | Heavy/ | Caggtgcagctggtgcagagcggcgcggaagtgaaaaaaccgggcgcgagcg |
| | SEQ ID | tgaaagtgagctgcaaagcgagcggctatacctttaccggctatattatgaa |
| | NO: 386 | ctgggtgcgccaggcgccgggccagggcctggaatggatgggcctgattaac |
| | | ccgtataacggcggcaccgattataacccgcagtttcaggatcgcgtgacca |
| | | ttaccgcggataaaagcaccagcaccgcgtatatggaactgagcagcctgcg |
| | | cagcgaagataccgcggtgtattattgcgcgcgcgatggctatgatgatggc |
| | | ccgtataccctggaaacctggggccagggcaccctggtgaccgtgagcagcg |
| | | cgagcaccaaaggcccgagcgtgtttccgctggcgccgagcagcaaaagcac |
| | | cagcggcggcaccgcggcgctgggctgcctggtgaaagattattttccggaa |
| | | ccggtgaccgtgagctggaacagcggcgcgctgaccagcggcgtgcatacct |
| | | ttccggcggtgctgcagagcagcggcctgtatagcctgagcagcgtggtgac |
| | | cgtgccgagcagcaactttggcacccagacctatacctgcaacgtggatcat |
| | | aaaccgagcaacaccaaagtggataaaaccgtggaa |
| | | cgcaaaagctgcgtggaa |
| | | +/− TGCCCCCCCTGCCCCGCC +/− CCCCCCGTGGCCGGC |
| Nemolizumab | Light/ | Gatattcagatgacccagagcccgagcagcctgagcgcgagcgtgggcgatc |
| | SEQ ID | gcgtgaccattacctgccaggcgagcgaagatatttatagctttgtggcgtg |
| | NO: 387 | gtatcagcagaaaccgggcaaagcgccgaaactgctgatttataacgcgcag |
| | | accgaagcgcagggcgtgccgagccgctttagcggcagcggcagcggcaccg |
| | | attttaccctgaccattagcagcctgcagccggaagattttgcgacctatta |
| | | ttgccagcatcattatgatagcccgctgacctttggcggcggcaccaaagtg |
| | | gaaattaaacgcaccgtggcggcgccgagcgtgtttatttttccgccgagcg |
| | | atgaacagctgaaaagcggcaccgcgagcgtggtgtgcctgctgaacaactt |
| | | ttatccgcgcgaagcgaaagtgcagtggaaagtggataacgcgctgcagagc |
| | | ggcaacagccaggaaagcgtgaccgaacaggatagcaaagatagcacctata |
| | | gcctgagcagcaccctgaccctgagcaaagcggattatgaaaaacataaagt |
| | | gtatgcgtgcgaagtgacccatcagggcctgagcagcccggtgaccaaaagc |
| | | tttaaccgcggcgaatgc |
| Omalizumab | Heavy/ | Gaagtgcagctggtggaaagcggcggcggcctggtgcagccgggcggcagcc |
| | SEQ ID | tgcgcctgagctgcgcggtgagcggctatagcattaccagcggctatagctg |
| | NO: 388 | gaactggattcgccaggcgccgggcaaaggcctggaatgggtggcgagcatt |
| | | acctatgatggcagcaccaactatgcggatagcgtgaaaggccgctttacca |
| | | ttagccgcgatgatagcaaaaacaccttttatctgcagatgaacagcctgcg |
| | | cgcggaagataccgcggtgtattattgcgcgcgcggcagccattattttggc |
| | | cattggcattttgcggtgtggggccagggcaccctggtgaccgtgagcagcg |
| | | gcccgagcgtgtttccgctggcgccgagcagcaaaagcaccagcggcggcac |
| | | cgcggcgctgggctgcctggtgaaagattattttccggaaccggtgaccgtg |
| | | agctggaacagcggcgcgctgaccagcggcgtgcatacctttccggcggtgc |
| | | tgcagagcagcggcctgtatagcctgagcagcgtggtgaccgtgccgagcag |
| | | cagcctgggcacccagacctatatttgcaacgtgaaccataaaccgagcaac |
| | | accaaagtggataaaaaagcg +/− AAGACCCACACC (or |
| | | AAGACCCACCTG) +/− TGCCCCCCCTGCCCCGCC +/− |
| | | CCCGAGCTGGCCGGCGCCCCCAGCGTGTTCCTG |
| Omalizumab | Light/ | Gatattcagctgacccagagcccgagcagcctgagcgcgagcgtgggcgatc |
| | SEQ ID | gcgtgaccattacctgccgcgcgagccagagcgtggattatgatggcgatag |
| | NO: 389 | ctatatgaactggtatcagcagaaaccgggcaaagcgccgaaactgctgatt |
| | | tatgcggcgagctatctggaaagcggcgtgccgagccgctttagcggcagcg |
| | | gcagcggcaccgattttaccctgaccattagcagcctgcagccggaagattt |
| | | tgcgacctattattgccagcagagccatgaagatccgtatacctttggccag |
| | | ggcaccaaagtggaaattaaacgcaccgtggcggcgccgagcgtgtttattt |
| | | ttccgccgagcgatgaacagctgaaaagcggcaccgcgagcgtggtgtgcct |
| | | gctgaacaacttttatccgcgcgaagcgaaagtgcagtggaaagtggataac |
| | | gcgctgcagagcggcaacagccaggaaagcgtgaccgaacaggatagcaaag |
| | | atagcacctatagcctgagcagcaccctgaccctgagcaaagcggattatga |
| | | aaaacataaagtgtatgcgtgcgaagtgacccatcagggcctgagcagcccg |
| | | gtgaccaaaagctttaaccgcggcgaatgc |
| Tezepelumab | Heavy/ | Cagatgcagctggtggaaagcggcggcggcgtggtgcagccgggccgcagcc |
| | SEQ ID | tgcgcctgagctgcgcggcgagcggctttacctttcgcacctatggcatgca |
| | NO: 390 | ttgggtgcgccaggcgccgggcaaaggcctggaatgggtggcggtgatttgg |
| | | tatgatggcagcaacaaacattatgcggatagcgtgaaaggccgctttacca |
| | | ttacccgcgataacagcaaaaacaccctgaacctgcagatgaacagcctgcg |
| | | cgcggaagataccgcggtgtattattgcgcgcgcgcgccgcagtgggaactg |
| | | gtgcatgaagcgtttgatatttggggccagggcaccatggtgaccgtgagca |
| | | gcgcgagcaccaaaggcccgagcgtgtttccgctggcgccgtgcagccgcag |
| | | caccagcgaaagcaccgcggcgctgggctgcctggtgaaagattattttccg |
| | | gaaccggtgaccgtgagctggaacagcggcgcgctgaccagcggcgtgcata |
| | | cctttccggcggtgctgcagagcagcggcctgtatagcctgagcagcgtggt |
| | | gaccgtgccgagcagcaactttggcacccagacctatacctgcaacgtggat |
| | | cataaaccgagcaacaccaaagtggataaaaccgtg +/− |
| | | TGCCCCCCCTGCCCCGCC +/− CCCCCCGTGGCCGGC |
| Tezepelumab | Light/ | agctatgtgctgacccagccgccgagcgtgagcgtggcgccgggccagaccg |
| | SEQ ID | cgcgcattacctgcggcggcaacaacctgggcagcaaaagcgtgcattggta |
| | NO: 391 | tcagcagaaaccgggccaggcgccggtgctggtggtgtatgatgatagcgat |
| | | cgcccgagctggattccggaacgctttagcggcagcaacagcggcaacaccg |
| | | cgaccctgaccattagccgcggcgaagcgggcgatgaagcggattattattg |
| | | ccaggtgtgggatagcagcagcgatcatgtggtgtttggcggcggcaccaaa |
| | | ctgaccgtgctgggccagccgaaagcggcgccgagcgtgaccctgtttccgc |
| | | cgagcagcgaagaactgcaggcgaacaaagcgaccctggtgtgcctgattag |
| | | cgatttttatccgggcgcggtgaccgtggcgtggaaagcggatagcagcccg |
| | | gtgaaagcgggcgtggaaaccaccaccccgagcaaacagagcaacaacaaat |
| | | atgcggcgagcagctatctgagcctgaccccggaacagtggaaaagccatcg |
| | | cagctatagctgccaggtgacccatgaaggcagcaccgtggaaaaaaccgtg |
| | | gcgccgaccgaatgcagc |

TABLE 7
Table of Fc Domain Amino Acid Sequences

| | Chain/ | |
|---|---|---|
| | SEQ ID | |
| mAb | NO. | Sequence |
| Solanezumab | Fc | FPPKPKDTLM ISRTPEVTCV VVDVSHEDPE VKFNWYVDGV |
| | domain/ | EVHNAKTKPR EEQYNSTYRV VSVLTVLHQD WLNGKEYKCK |
| | SEQ ID | VSNKALPAPI EKTISKAKGQ PREPQVYTLP PSRDELTKNQ |
| | NO: 290 | VSLTCLVKGF YPSDIAVEWE SNGQPENNYK TTPPVLDSDG |
| | | SFFLYSKLTV DKSRWQQGNV FSCSVMHEAL HNHYTQKSLS |
| | | LSPGK |
| GSK933776 | Fc | FPPKPKDTLM ISRTPEVTCV VVDVSHEDPE VKFNWYVDGV |
| | domain/ | EVHNAKTKPR EEQYNSTYRV VSVLTVLHQD WLNGKEYKCK |
| | SEQ ID | VSNKALPAPI EKTISKAKGQ PREPQVYTLP PSRDELTKNQ |
| | NO: 291 | VSLTCLVKGF YPSDIAVEWE SNGQPENNYK TTPPVLDSDG |
| | | SFFLYSKLTV DKSRWQQGNV FSCSVMHEAL HNHYTQKSLS |
| | | LSPGK |
| UCB-0107 | Fc | FPPKPKDTLM ISRTPEVTCV VVDVSQEDPE VQFNWYVDGV |
| | domain/ | EVHNAKTKPR EEQFNSTYRV VSVLTVLHQD WLNGKEYKCK |
| | SEQ ID | VSNKGLPSSI EKTISKAKGQ PREPQVYTLP PSQEEMTKNQ |
| | NO: 292 | VSLTCLVKGF YPSDIAVEWE SNGQPENNYK TTPPVLDSDG |
| | | SFFLYSRLTV DKSRWQEGNV FSCSVMHEAL HNHYTQKSLS |
| | | LSLGK |
| Prasinezumab | Fc | FPPKPKDTLM ISRTPEVTCV VVDVSHEDPE VKFNWYVDGV |
| | domain/ | EVHNAKTKPR EEQYNSTYRV VSVLTVLHQD WLNGKEYKCK |
| | SEQ ID | VSNKALPAPI EKTISKAKGQ PREPQVYTLP PSREEMTKNQ |
| | NO: 293 | VSLTCLVKGF YPSDIAVEWE SNGQPENNYK TTPPVLDSDG |
| | | SFFLYSKLTV DKSRWQQGNV FSCSVMHEAL HNHYTQKSLS LSPGK |
| MEDI- | Fc | FPPKPKDTLM ISRTPEVTCV VVDVSHEDPE VKFNWYVDGV |
| 1341/TAK 341 | domain/ | EVHNAKTKPR EEQYNSTYRV VSVLTVLHQD WLNGKEYKCK |
| | SEQ ID | VSNKALPASI EKTISKAKGQ PREPQVYTLP PSREEMTKNQ |
| | NO: 294 | VSLTCLVKGF YPSDIAVEWE SNGQPENNYK TTPPVLDSDG |
| | | SFFLYSKLTV DKSRWQQGNV FSCSVMHEAL HNHYTQKSLS LSPGK |
| NI-204.10D12 | Fc | FPPKPKDTLM ISRTPEVTCV VVDVSHEDPE VKFNWYVDGV |
| | domain/ | EVHNAKTKPR EEQYNSTYRV VSVLTVLHQD WLNGKEYKCK |
| | SEQ ID | VSNKALPAPI EKTISKAKGQ PREPQVYTLP PSREEMTKNQ |
| | NO: 295 | VSLTCLVKGF YPSDIAVEWE SNGQPENNYK TTPPVLDSDG |
| | | SFFLYSKLTV DKSRWQQGNV FSCSVMHEAL HNHYTQKSLS LSPGK |
| Eptinezumab | Fc | FPPKPKDTLM ISRTPEVTCV VVDVSHEDPE VKFNWYVDGV |
| | domain/ | EVHNAKTKPR EEQYASTYRV VSVLTVLHQD WLNGKEYKCK |
| | SEQ ID | VSNKALPAPI EKTISKAKGQ PREPQVYTLP PSREEMTKNQ |
| | NO: 296 | VSLTCLVKGF YPSDIAVEWE SNGQPENNYK TTPPVLDSDG |
| | | SFFLYSKLTV DKSRWQQGNV FSCSVMHEAL HNHYTQKSLS LSPGK |
| Fremanezumab | Fc | FPPKPKDTLM ISRTPEVTCV VVDVSHEDPE VQFNWYVDGV |
| | domain/ | EVHNAKTKPR EEQFNSTFRV VSVLTVVHQD WLNGKEYKCK |
| | SEQ ID | VSNKGLPSSI EKTISKTKGQ PREPQVYTLP PSREEMTKNQ |
| | NO: 297 | VSLTCLVKGF YPSDIAVEWE SNGQPENNYK TTPPMLDSDG |
| | | SFFLYSKLTV DKSRWQQGNV FSCSVMHEAL HNHYTQKSLS LSPGK |
| Galcanezumab | Fc | FPPKPKDTL MISRTPEVTC VVVDVSQEDP EVQFNWYVDG |
| | domain/ | VEVHNAKTKP REEQFNSTYR VVSVLTVLHQ DWLNGKEYKC |
| | SEQ ID | KVSNKGLPSS IEKTISKAKG QPREPQVYTL PPSQEEMTKN |
| | NO: 298 | QVSLTCLVKG FYPSDIAVEW ESNGQPENNY KTTPPVLDSD |
| | | GSFFLYSRLT VDKSRWQEGN VFSCSVMHEA LHNHYTQKSL SLSLGK |
| Sevacizumab | Fc | FPPKPKDTLM ISRTPEVTCV VVDVSHEDPE VKFNWYVDGV |
| | domain/ | EVHNAKTKPR EEQYNSTYRV VSVLTVLHQD WLNGKEYKCK |
| | SEQ ID | VSNKALPAPI EKTISKAKGQ PREPQVYTLP PSRDELTKNQ |
| | NO: 299 | VSLTCLVKGF YPSDIAVEWE SNGQPENNYK TTPPVLDSDG |
| | | SFFLYSKLTV DKSRWQQGNV FSCSVMHEAL HNHYTQKSLS LSPGK |
| Ascrinvacumab | Fc | PSVFL FPPKPKDTLM ISRTPEVTCV VVDVSHEDPE VQFNWYVDGV |
| | domain/ | EVHNAKTKPR EEQFNSTFRV VSVLTVVHQD WLNGKEYKCK |
| | SEQ ID | VSNKGLPAPI EKTISKTKGQ PREPQVYTLP PSREEMTKNQ |
| | NO: 300 | VSLTCLVKGF YPSDIAVEWE SNGQPENNYK TTPPMLDSDG |
| | | SFFLYSKLTV DKSRWQQGNV FSCSVMHEAL HNHYTQKSLS LSPGK |
| Tesidolumab | Fc | FPPKPKDTLM ISRTPEVTCV VVDVSHEDPE VKFNWYVDGV |
| | domain/ | EVHNAKTKPR EEQYNSTYRV VSVLTVLHQD WLNGKEYKCK |
| | SEQ ID | VSNKALPAPI EKTISKAKGQ PREPQVYTLP PSREEMTKNQ |
| | NO: 301 | VSLTCLVKGF YPSDIAVEWE SNGQPENNYK TTPPVLDSDG |
| | | SFFLYSKLTV DKSRWQQGNV FSCSVMHEAL HNHYTQKSLS LSPGK |
| Carotuximab | Fc | FPPKPKDTLM ISRTPEVTCV VVDVSHEDPE VKFNWYVDGV |
| | domain/ | EVHNAKTKPR EEQYNSTYRV VSVLTVLHQD WLNGKEYKCK |
| | SEQ ID | VSNKALPAPI EKTISKAKGQ PREPQVYTLP PSRDELTKNQ |
| | NO: 302 | VSLTCLVKGF YPSDIAVEWE SNGQPENNYK TTPPVLDSDG |
| | | SFFLYSKLTV DKSRWQQGNV FSCSVMHEAL HNHYTQKSLS LSPGK |
| Adalimumab | Fc | FPPKPKDTLM ISRTPEVTCV VVDVSHEDPE VKFNWYVDGV |
| | domain/ | EVHNAKTKPR EEQYNSTYRV VSVLTVLHQD WLNGKEYKCK |
| | SEQ ID | VSNKALPAPI EKTISKAKGQ PREPQVYTLP PSRDELTKNQ |
| | NO: 303 | VSLTCLVKGF YPSDIAVEWE SNGQPENNYK TTPPVLDSDG |
| | | SFFLYSKLTV DKSRWQQGNV FSCSVMHEAL HNHYTQKSLS LSPGK |
| Infliximab | Fc | FPPKPKDTLM ISRTPEVTCV VVDVSHEDPE VKFNWYVDGV |
| | domain/ | EVHNAKTKPR EEQYNSTYRV VSVLTVLHQD WLNGKEYKCK |
| | SEQ ID | VSNKALPAPI EKTISKAKGQ PREPQVYTLP PSRDELTKNQ |
| | NO: 304 | VSLTCLVKGF YPSDIAVEWE SNGQPENNYK TTPPVLDSDG |
| | | SFFLYSKLTV DKSRWQQGNV FSCSVMHEAL HNHYTQKSLS LSPGK |
| Golimumab | Fc | FPPKPKDTLM ISRTPEVTCV VVDVSHEDPE VKFNWYVDGV |
| | domain/ | EVHNAKTKPR EEQYNSTYRV VSVLTVLHQD WLNGKEYKCK |
| | SEQ ID | VSNKALPAPI EKTISKAKGQ PREPQVYTLP PSRDELTKNQ |
| | NO: 305 | VSLTCLVKGF YPSDIAVEWE SNGQPENNYK TTPPVLDSDG |
| | | SFFLYSKLTV DKSRWQQGNV FSCSVMHEAL HNHYTQKSLS LSPGK |
| Elezanumab | Fc | FPPKPKDQLM ISRTPEVTCV VVDVSHEDPE VKFNWYVDGV EVHNAKTKPR |
| | domain/ | EEQYNSTYRV VSVLTVLHQD WLNGKEYKCK VSNKALPAPI EKTISKAKGQ |
| | SEQ ID | PREPQVYTLP PSREEMTKNQ VSLTCLVKGF YPSDIAVEWE SNGQPENNYK |
| | NO: 306 | TTPPVLDSDG SFFLYSKLTV DKSRWQQGNV FSCSVLHEAL HNHYTQKSLS |
| | | LSPGK |
| PRX-004 | Fc | FPPKPKDTLM ISRTPEVTCV VVDVSHEDPE VKFNWYVDGV |
| | domain/ | EVHNAKTKPR EEQYNSTYRV VSVLTVLHQD WLNGKEYKCK |
| | SEQ ID | VSNKALPAPI EKTISKAKGQ PREPQVYTLP PSREEMTKNQ |
| | NO: 307 | VSLTCLVKGF YPSDIAVEWE SNGQPENNYK TTPPVLDSDG |
| | | SFFLYSKLTV DKSRWQQGNV FSCSVMHEAL HNHYTQKSLS LSPGK |
| Pamrevlumab | Fc | FPPKPKDTLM ISRTPEVTCV VVDVSHEDPE VKFNWYVDGV |
| | domain/ | EVHNAKTKPR EEQYNSTYRV VSVLTVLHQD WLNGKEYKCK |
| | SEQ ID | VSNKALPAPI EKTISKAKGQ PREPQVYTLP PSREEMTKNQ |
| | NO: 308 | VSLTCLVKGF YPSDIAVEWE SNGQPENNYK TTPPVLDSDG |
| | | SFFLYSKLTV DKSRWQQGNV FSCSVMHEAL HNHYTQKSLS LSPGK |
| Satralizumab | Fc | PSVFL FPPKPKDTLM ISRTPEVTCV VVDVSQEDPE VQFNWYVDGV |
| | domain/ | EVHNAKTKPR EEQFNSTFRV VSVLTVVHQD WLNGKEYKCK |
| | SEQ ID | VSNKGLPAPI EKTISKTKGQ PREPQVYTLP PSQEEMTKNQ |
| | NO: 309 | VSLTCLVKGF YPSDIAVEWE SNGQPENNYK TTPPMLDSDG |
| | | SFFLYSKLTV DKSRWQEGNV FSCSVMHEAL HAHYTQKSLS LSP |
| Sarilumab | Fc | FPPKPKDTLM ISRTPEVTCV VVDVSHEDPE VKFNWYVDGV |
| | domain/ | EVHNAKTKPR EEQYNSTYRV VSVLTVLHQD WLNGKEYKCK |
| | SEQ ID | VSNKALPAPI EKTISKAKGQ PREPQVYTLP PSRDELTKNQ |
| | NO: 310 | VSLTCLVKGF YPSDIAVEWE SNGQPENNYK TTPPVLDSDG |
| | | SFFLYSKLTV DKSRWQQGNV FSCSVMHEAL HNHYTQKSLS LSPGK |
| Inebilizumab | Fc | FPPKPKDTLM ISRTPEVTCV VVDVSHEDPE VKFNWYVDGV |
| | domain/ | EVHNAKTKPR EEQYNSTYRV VSVLTVLHQD WLNGKEYKCK |
| | SEQ ID | VSNKALPAPI EKTISKAKGQ PREPQVYTLP PSREEMTKNQ |
| | NO: 311 | VSLTCLVKGF YPSDIAVEWE SNGQPENNYK TTPPVLDSDG |
| | | SFFLYSKLTV DKSRWQQGNV FSCSVMHEAL HNHYTQKSLS LSPGK |
| Etrolizumab | Fc | FPPKPKDTLMI SRTPEVTCVV VDVSHEDPEV KFNWYVDGVE |
| | domain/ | VHNAKTKPRE EQYNSTYRVV SVLTVLHQDW LNGKEYKCKV |
| | SEQ ID | SNKALPAPIE KTISKAKGQP REPQVYTLPP SREEMTKNQV |
| | NO: 312 | SLTCLVKGFY PSDIAVEWES NGQPENNYKT TPPVLDSDGS |
| | | FFLYSKLTVD KSRWQQGNVF SCSVMHEALH NHYTQKSLSL SPG |
| Romosozumab | Fc | PSVFL FPPKPKDTLM ISRTPEVTCV VVDVSHEDPE VQFNWYVDGV |
| | domain/ | EVHNAKTKPR EEQFNSTFRV VSVLTVVHQD WLNGKEYKCK |
| | SEQ ID | VSNKGLPAPI EKTISKTKGQ PREPQVYTLP PSREEMTKNQ |
| | NO:313 | VSLTCLVKGF YPSDIAVEWE SNGQPENNYK TTPPMLDSDG |
| | | SFFLYSKLTV DKSRWQQGNV FSCSVMHEAL HNHYTQKSLS LSPGK |
| Lanadelumab | Fc | FPPKPKDTLM ISRTPEVTCV VVDVSHEDPE VKFNWYVDGV |
| | domain/ | EVHNAKTKPR EEQYNSTYRV VSVLTVLHQD WLNGKEYKCK |
| | SEQ ID | VSNKALPAPI EKTISKAKGQ PREPQVYTLP PSREEMTKNQ |
| | NO: 314 | VSLTCLVKGF YPSDIAVEWE SNGQPENNYK TTPPVLDSDG |
| | | SFFLYSKLTV DKSRWQQGNV FSCSVMHEAL HNHYTQKSLS LSPG |
| Siltuximab | Fc | FPPKPKDTLM ISRTPEVTCV VVDVSHEDPE VKFNWYVDGV |
| | domain/ | EVHNAKTKPR EEQYNSTYRV VSVLTVLHQD WLNGKEYKCK |
| | SEQ ID | VSNKALPAPI EKTISKAKGQ PREPQVYTLP PSRDELTKNQ |
| | NO: 355 | VSLTCLVKGF YPSDIAVEWE SNGQPENNYK TTPPVLDSDG |
| | | SFFLYSKLTV DKSRWQQGNV FSCSVMHEAL HNHYTQKSLS LSPGK |
| Clazakizumab | Fc | FPPKPKDTLM ISRTPEVTCV VVDVSHEDPE VKFNWYVDGV |
| | domain/ | EVHNAKTKPR EEQYASTYRV VSVLTVLHQD WLNGKEYKCK |
| | SEQ ID | VSNKALPAPI EKTISKAKGQ PREPQVYTLP PSREEMTKNQ |
| | NO: 356 | VSLTCLVKGF YPSDIAVEWE SNGQPENNYK TTPPVLDSDG |
| | | SFFLYSKLTV DKSRWQQGNV FSCSVMHEAL HNHYTQKSLS LSPGK |
| Sirukumab | Fc | FPPKPKDTLM ISRTPEVTCV VVDVSHEDPE VKFNWYVDGV |
| | domain/ | EVHNAKTKPR EEQYNSTYRV VSVLTVLHQD WLNGKEYKCK |
| | SEQ ID | VSNKALPAPI EKTISKAKGQ PREPQVYTLP PSRDELTKNQ |
| | NO: 357 | VSLTCLVKGF YPSDIAVEWE SNGQPENNYK TTPPVLDSDG |
| | | SFFLYSKLTV DKSRWQQGNV FSCSVMHEAL HNHYTQKSLS LSPGK |
| Olokizumab | Fc | FPPKPKDTLM ISRTPEVTCV VVDVSQEDPE VQFNWYVDGV |
| | domain/ | EVHNAKTKPR EEQFNSTYRV VSVLTVLHQD WLNGKEYKCK |
| | SEQ ID | VSNKGLPSSI EKTISKAKGQ PREPQVYTLP PSQEEMTKNQ |
| | NO: 358 | VSLTCLVKGF YPSDIAVEWE SNGQPENNYK TTPPVLDSDG |
| | | SFFLYSRLTV DKSRWQEGNV FSCSVMHEAL HNHYTQKSLS LSLGK |
| Tocilizumab | Fc | FPPKPKDTLM ISRTPEVTCV VVDVSHEDPE VKFNWYVDGV |
| | domain/ | EVHNAKTKPR EEQYNSTYRV VSVLTVLHQD WLNGKEYKCK |
| | SEQ ID | VSNKALPAPI EKTISKAKGQ PREPQVYTLP PSRDELTKNQ |
| | NO: 359 | VSLTCLVKGF YPSDIAVEWE SNGQPENNYK TTPPVLDSDG |
| | | SFFLYSKLTV DKSRWQQGNV FSCSVMHEAL HNHYTQKSLS LSPG |
| Lecanemab | Fc | FPPKPKDTLM ISRTPEVTCV VVDVSHEDPE VKFNWYVDGV |
| | domain/ | EVHNAKTKPR EEQYNSTYRV VSVLTVLHQD WLNGKEYKCK |
| | SEQ ID | VSNKALPAPI EKTISKAKGQ PREPQVYTLP PSREEMTKNQ |
| | No: 392 | VSLTCLVKGF YPSDIAVEWE SNGQPENNYK TTPPVLDSDG |
| | | SFFLYSKLTV DKSRWQQGNV FSCSVMHEAL HNHYTQKSLS LSPGK |
| Ravulizumab | Fc | FPPKPKDTLM ISRTPEVTCV VVDVSQEDPE VQFNWYVDGV |
| | Domain/ | EVHNAKTKPR EEQFNSTYRV VSVLTVLHQD WLNGKEYKCK |
| | SEQ ID | VSNKGLPSSI EKTISKAKGQ PPEPQVYTLP PSQEEMTKNQ |
| | NO: 393 | VSLTCLVKGF YPSDIAVEWE SNGQPENNYK TTPPVLDSDG |
| | | SFFLYSRLTV DKSRWQEGNV FSCSVLHEAL HSHYTQKSLS LSLGK |
| Benralizumab | Fc | FPPKPKDTLM ISRTPEVTCV VVDVSHEDPE VKFNWYVDGV |
| | Domain/ | EVHNAKTKPR EEQYNSTYRV VSVLTVLHQD WLNGKEYKCK |
| | SEQ ID | VSNKALPAPI EKTISKAKGQ PREPQVYTLP PSRDELTKNQ |
| | NO: 394 | VSLTCLVKGF YPSDIAVEWE SNGQPENNYK TTPPVLDSDG |
| | | SFFLYSKLTV DKSRWQQGNV FSCSVMHEAL HNHYTQKSLS LSPGK |
| Reslizumab | Fc | FPPKPKDTLM ISRTPEVTCV VVDVSQEDPE VQFNWYVDGV |
| | Domain/ | EVHNAKTKPR EEQFNSTYRV VSVLTVLHQD WLNGKEYKCK |
| | SEQ ID | VSNKGLPSSI EKTISKAKGQ PREPQVYTLP PSQEEMTKNQ |
| | NO: 395 | VSLTCLVKGF YPSDIAVEWE SNGQPENNYK TTPPVLDSDG |
| | | SFFLYSRLTV DKSRWQEGNV FSCSVMHEAL HNHYTQKSLS LSLGK |
| Tralokinumab | Fc | FPPKPKDTLM ISRTPEVTCV VVDVSQEDPE VQFNWYVDGV |
| | Domain/ | EVHNAKTKPR EEQFNSTYRV VSVLTVLHQD WLNGKEYKCK |
| | SEQ ID | VSNKGLPSSI EKTISKAKGQ PREPQVYTLP PSQEEMTKNQ |
| | NO: 396 | VSLTCLVKGF YPSDIAVEWE SNGQPENNYK TTPPVLDSDG |
| | | SFFLYSRLTV DKSRWQEGNV FSCSVMHEAL HNHYTQKSLS LSLGK |
| Nemolizumab | Fc | FPPKPKDTLM ISRTPEVTCV VVDVSQEDPE VQFNWYVDGV |
| | Domain/ | EVHNAKTKPR EEQFNSTFRV VSVLTVVHQD WLNGKEYKCK |
| | SEQ ID | VSNKGLPAPI EKTISKTKGQ PREPQVYTLP PSQEEMTKNQ |
| | NO: 397 | VSLTCLVKGF YPSDIAVEWE SNGQPENNYK TTPPMLDSDG |
| | | SFFLYSKLTV DKSRWQEGNV FSCSVMHEAL HNHYTQKSLS LSP |
| Omalizumab | Fc | FPPKPKDTLM ISRTPEVTCV VVDVSHEDPE VKFNWYVDGV |
| | Domain/ | EVHNAKTKPR EEQYNSTYRV VSVLTVLHQD WLNGKEYKCK |
| | SEQ ID | VSNKALPAPI EKTISKAKGQ PREPQVYTLP PSRDELTKNQ |
| | NO: 398 | VSLTCLVKGF YPSDIAVEWE SNGQPENNYK TTPPVLDSDG |
| | | SFFLYSKLTV DKSRWQQGNV FSCSVMHEAL HNHYTQKSLS LSPGK |

### 5.4 Delivery of Gene Therapy Constructs

### 5.4.1 Constructs for Delivery to CNS

[1248] Sections 5.3.1, 5.3.2, 5.3.3, 5.3.4, 5.3.5., 5.3.6., and 5.3.7. describe recombinant vectors that contain a transgene encoding a HuPTM mAb or HuPTM Fab (or other antigen binding fragment of the HuPTM mAb) that binds to Aβ, sortilin, Tau protein, SEMA4D, alpha-synuclein, SOD1, and CGRPR, respectively. Such recombinant vector used for delivering the transgene should have a tropism for human CNS cells, such as glial and neuronal cells. Such vectors can include non-replicating recombinant adeno-associated virus vectors (“rAAV”), particularly those bearing an AAV9, AAVrh10, AAVrh20, AAVrh39, or AAVcy5 capsid. However, other viral vectors may be used, including but not limited to lentiviral vectors, vaccinia viral vectors, or non-viral expression vectors referred to as “naked DNA” constructs.

[1249] In specific embodiments, provided are constructs for gene therapy administration to a human subject, comprising an AAV vector, which comprises a viral capsid that is at least 95% identical to the amino acid sequence of an AAV9 capsid (SEQ ID NO: 144); and a viral or artificial genome comprising an expression cassette flanked by AAV inverted terminal repeats (ITRs) wherein the expression cassette comprises a transgene encoding the heavy and light chains of the therapeutic antibody, operably linked to one or more regulatory sequences that control expression of the transgene in human cells that express and deliver the therapeutic antibody in a therapeutically appropriate manner as disclosed herein, particularly expressed from CNS cells. In certain embodiments, the encoded AAV9 capsid has the sequence of SEQ ID NO: 144 with 1, 2, 3, 4, 5, 6, 7, 8, 9, 10, 11, 12, 13, 14, 15, 16, 17, 18, 19, 20, 21, 22, 23, 24, 25, 26, 27, 28, 29 or 30 amino acid substitutions, particularly substitutions with amino acid residues found in the corresponding position in other AAV capsids, for example, in the SUBS row of FIG. 21 which provides a comparison of the amino acid sequences of the capsid sequences of various AAVs, highlighting amino acids appropriate for substitution at different positions within the capsid sequence.

[1250] In other specific embodiments, provided are constructs for gene therapy administration to a human subject, comprising an AAV vector, which comprises a viral capsid that is at least 95% identical to the amino acid sequence of an AAVrh10 capsid (SEQ ID NO: 145); and a viral or artificial genome comprising an expression cassette flanked by AAV inverted terminal repeats (ITRs) wherein the expression cassette comprises a transgene encoding the heavy and light chains of the therapeutic antibody, operably linked to one or more regulatory sequences that control expression of the transgene in human cells that express and deliver the therapeutic antibody in a therapeutically appropriate manner as disclosed herein, particularly from CNS cells. In certain embodiments, the encoded AAVrh10 capsid has the sequence of SEQ ID NO: 145 with 1, 2, 3, 4, 5, 6, 7, 8, 9, 10, 11, 12, 13, 14, 15, 16, 17, 18, 19, 20, 21, 22, 23, 24, 25, 26, 27, 28, 29 or 30 amino acid substitutions, particularly substitutions with amino acid residues found in the corresponding position in other AAV capsids, for example, in the SUBS row of FIG. 21 which provides a comparison of the amino acid sequences of the capsid sequences of various AAVs, highlighting amino acids appropriate for substitution at different positions within the capsid sequence.

[1251] In some embodiments, the HuPTM mAb or antigen binding fragment thereof, including the HuPTM Fab transgene should be controlled by appropriate expression control elements for expression of the HuPTM mAb or HuPTM Fab in human CNS cells, for example, the CB7 promoter (a chicken β-actin promoter and CMV enhancer), RSV promoter, GFAP promoter (glial fibrillary acidic protein), MBP promoter (myelin basic protein), MMT promoter, EF-1α, U86 promoter, RPE65 promoter or opsin promoter, an inducible promoter, for example, a hypoxia-inducible promoter or a drug inducible promoter, such as a promoters induced by rapamycin and related agents, and other expression control elements that enhance expression of the transgene driven by the vector (e.g., introns such as the chicken β-actin intron, minute virus of mice (MVM) intron, human factor IX intron (e.g., FIX truncated intron 1), β-globin splice donor/immunoglobulin heavy chain spice acceptor intron, adenovirus splice donor/immunoglobulin splice acceptor intron, SV40 late splice donor/splice acceptor (19S/16S) intron, and hybrid adenovirus splice donor/IgG splice acceptor intron and polyA signals such as the rabbit β-globin polyA signal, human growth hormone (hGH) polyA signal, SV40 late polyA signal, synthetic polyA (SPA) signal, and bovine growth hormone (bGH) polyA signal). See, e.g., Powell and Rivera-Soto, 2015, Discov. Med., 19(102):49-57.

[1252] Gene therapy constructs are designed such that both the heavy and light chains are expressed. More specifically, the heavy and light chains should be expressed at about equal amounts, in other words, the heavy and light chains are expressed at approximately a 1:1 ratio of heavy chains to light chains. The coding sequences for the heavy and light chains can be engineered in a single construct in which the heavy and light chains are separated by a cleavable linker or IRES so that separate heavy and light chain polypeptides are expressed. The leader sequence for each of the heavy and light chains is, e.g., MYRMQLLLLIALSLALVTNS (SEQ ID NO: 146) or one of the leader sequences provided in Table 2. Section 5.1.5, supra, provides specific IRES, 2A, and other linker sequences that can be used with the methods and compositions provided herein. In specific embodiments, the linker is a Furin-2A linker, for example a Furin-F2A linker RKRR(GSG)APVKQTLNFDLLKLAGDVESNPGP (SEQ ID NO: 231. In preferred embodiments, the linker is a Furin-2A linker, for example a Furin-T2A linker RKRR(GSG)EGRGSLLTCGDVEENPGP (SEQ ID NO: 429). In specific embodiments, the transgene is a nucleotide sequence that encodes the following: Signal sequence-heavy chain Fab portion-Furin-2A linker-signal sequence-light chain Fab portion. See, e.g., FIGS. 2A-2C for sequences for Solanezumab, lecanemab, and GSK933776 Fab expression, respectively; FIG. 3 for sequence for AL-001 Fab expression; FIGS. 4A-4C for the sequence for ABBV-8E12, UCB-0107, and NI-105 Fab expression, respectively; FIG. 5 for the sequence for VX15/2503 Fab expression; FIGS. 6A-C for the sequence for prasinezumab, NI-202, and MED-1341 Fab expression, respectively; FIGS. 7A-B for the sequence for NI-204 Fab expression; and FIG. 8A-C for the sequence for eptinezumab, fremanezumab, and galcanezumab Fab expression, respectively. In an alternative embodiment, the construct also comprises the nucleotide sequence encoding the Fc domain for the therapeutic antibody (see Table 7 or FIG. 23) for expression of the full length mAb.

[1253] In a specific embodiment, the constructs described herein comprise the following components: (1) AAV2 inverted terminal repeats that flank the expression cassette; (2) Control elements, which include a) the CB7 promoter, comprising the CMV enhancer/chicken β-actin promoter, b) a chicken β-actin intron and c) a rabbit 3-globin poly A signal; and (3) nucleic acid sequences coding for the heavy and light chains of the A3-binding, sortilin-binding, Tau protein-binding, SEMA4D-binding, alpha-synuclein-binding, SOD1-binding, or CGRPR-binding Fab, separated by a self-cleaving furin (F)/2A linker, ensuring expression of equal amounts of the heavy and the light chain polypeptides. An exemplary construct is provided in FIG. 1.

[1254] In specific embodiments, provided are AAV vectors comprising a viral capsid that is at least 95% identical to the amino acid sequence of an AAV9 capsid (SEQ ID NO: 144) or AAVrh10 (SEQ ID NO: 145); and an artificial genome comprising an expression cassette flanked by AAV inverted terminal repeats (ITRs), wherein the expression cassette comprises a transgene encoding an anti-Aβ, anti-sortilin, anti-Tau protein, anti-SEMA4D, anti-alpha-synuclein, anti-SOD1, or anti-CGRPR mAb, or an antigen-binding fragment thereof, operably linked to one or more regulatory sequences that control expression of the transgene in human CNS cells.

### 5.4.2 Constructs for Delivery to Liver or Muscle Cells

[1255] Sections 5.3.8, 5.3.9, 5.3.10, 5.3.11, 5.3.12, 5.3.13, 5.3.14, 5.3.15, 5.3.16, 5.3.17, 5.3.18, 5.3.19, 5.3.20, and 5.3.21 describe recombinant vectors that contain a transgene encoding a HuPTM mAb or HuPTM Fab (or other antigen binding fragment of the HuPTM mAb) that binds VEGF, EpoR, ALK-1, C5, ENG, CC1Q, TNFα, RGMa, TTR, CTGF, IL6R, IL6, CD19, ITGF7, SOST, pKal, IL-6, IL-6R, IL/ILR, IgE, or TSLP. Such recombinant vector used for delivering the transgene can have a tropism for human liver or muscle cells. Such vectors can include non-replicating recombinant adeno-associated virus vectors (“rAAV”), e.g., those bearing an AAV8 or AAV9 capsid. However, other viral vectors may be used, including but not limited to lentiviral vectors, vaccinia viral vectors, or non-viral expression vectors referred to as “naked DNA” constructs.

[1256] In specific embodiments, provided are constructs for gene therapy administration to a human subject, comprising an AAV vector, which comprises a viral capsid that is at least 95% identical to the amino acid sequence of an AAV8 capsid (SEQ ID NO: 143); and a viral or artificial genome comprising an expression cassette flanked by AAV inverted terminal repeats (ITRs) wherein the expression cassette comprises a transgene encoding the heavy and light chains of the therapeutic antibody, operably linked to one or more regulatory sequences that control expression of the transgene in human cells (e.g., human muscle or liver cells) that express and deliver the therapeutic antibody in a therapeutically appropriate manner as disclosed herein. In certain embodiments, the encoded AAV8 capsid has the sequence of SEQ ID NO: 143 with 1, 2, 3, 4, 5, 6, 7, 8, 9, 10, 11, 12, 13, 14, 15, 16, 17, 18, 19, 20, 21, 22, 23, 24, 25, 26, 27, 28, 29 or 30 amino acid substitutions, particularly substitutions with amino acid residues found in the corresponding position in other AAV capsids, for example, in the SUBS row of FIG. 21 which provides a comparison of the amino acid sequences of the capsid sequences of various AAVs, highlighting amino acids appropriate for substitution at different positions within the capsid sequence.

[1257] In specific embodiments, provided are constructs for gene therapy administration to a human subject, comprising an AAV vector, which comprises a viral capsid that is at least 95% identical to the amino acid sequence of an AAV9 capsid (SEQ ID NO: 144); and a viral or artificial genome comprising an expression cassette flanked by AAV inverted terminal repeats (ITRs) wherein the expression cassette comprises a transgene encoding the heavy and light chains of the therapeutic antibody, operably linked to one or more regulatory sequences that control expression of the transgene in human cells (e.g., human muscle or liver cells) that express and deliver the therapeutic antibody in a therapeutically appropriate manner as disclosed herein. In certain embodiments, the encoded AAV9 capsid has the sequence of SEQ ID NO: 144 with 1, 2, 3, 4, 5, 6, 7, 8, 9, 10, 11, 12, 13, 14, 15, 16, 17, 18, 19, 20, 21, 22, 23, 24, 25, 26, 27, 28, 29 or 30 amino acid substitutions, particularly substitutions with amino acid residues found in the corresponding position in other AAV capsids, for example, in the SUBS row of FIG. 21 which provides a comparison of the amino acid sequences of the capsid sequences of various AAVs, highlighting amino acids appropriate for substitution at different positions within the capsid sequence.

[1258] In other embodiments, the HuPTM mAb or antigen binding fragment thereof, including the HuPTM Fab transgene should be controlled by appropriate expression control elements for expression of the HuPTM Fab in human liver or muscle cells, for example, the CB7 promoter (a chicken β-actin promoter and CMV enhancer, SEQ ID NO: 411), EF-1 alpha promoter (SEQ ID NO: 415), mU1α (SEQ ID NO: 414), or liver specific promoters such as the TBG (Thyroxine-binding Globulin) promoter (SEQ ID NO: 423), the APOA2 promoter, the SERPINA1 (hAAT) promoter, the ApoE.hAAT promoter (SEQ ID NO: 412), or the MIR122 promoter, or muscle specific promoters, such as the human desmin promoter, the CK8 promoter (SEQ ID NO: 413), or the human Pitx3 promoter, or inducible promoters, such as hypoxia-inducible promoters or rapamycin-inducible promoter, and can include other expression control elements that enhance expression of the transgene driven by the vector (e.g., introns such as the chicken β-actin intron, minute virus of mice (MVM) intron, human factor IX intron (e.g., FIX truncated intron 1), β-globin splice donor/immunoglobulin heavy chain spice acceptor intron, adenovirus splice donor/immunoglobulin splice acceptor intron, SV40 late splice donor/splice acceptor (19S/16S) intron, and hybrid adenovirus splice donor/IgG splice acceptor intron and polyA signals such as the rabbit β-globin polyA signal, human growth hormone (hGH) polyA signal, SV40 late polyA signal, synthetic polyA (SPA) signal, and bovine growth hormone (bGH) polyA signal). See, e.g., Powell and Rivera-Soto, 2015, Discov. Med., 19(102):49-57.

[1259] In some embodiments, transgene expression is controlled by tissue-specific promoters or regulatory elements that promote tissue-specificity, for example, for liver-specific expression, LSPX1 (SEQ ID NO: 315), LSPX2 (SEQ ID NO: 316), LTP1 (SEQ ID NO: 317), LTP2 (SEQ ID NO: 318), or LTP3 (SEQ ID NO: 319), for liver and muscle expression, LMTP6 (SEQ ID NO: 320), LMTP13 (SEQ ID NO: 321), LMTP14 (SEQ ID NO: 322), LMTP15 (SEQ ID NO: 323), LMTP18 (SEQ ID NO: 324), LMTP19 (SEQ ID NO: 325), or LMTP20 (SEQ ID NO: 326), or for liver and bone expression, LBTP1 (SEQ ID NO: 327) or LBTP2 (SEQ ID NO: 328), the sequences of which are provided in Table 1.

[1260] Gene therapy constructs are designed such that both the heavy and light chains are expressed. More specifically, the heavy and light chains should be expressed at about equal amounts, in other words, the heavy and light chains are expressed at approximately a 1:1 ratio of heavy chains to light chains. The coding sequences for the heavy and light chains can be engineered in a single construct in which the heavy and light chains are separated by a cleavable linker or IRES so that separate heavy and light chain polypeptides are expressed. The leader sequence for each of the heavy and light chains is, e.g., MYRMQLLLLIALSLALVTNS (SEQ ID NO: 146). Section 5.1.5, supra, provides specific IRES, 2A, and other linker sequences that can be used with the methods and compositions provided herein. In specific embodiments, the linker is a Furin-2A linker, for example, a Furin-F2A linker RKRR(GSG)APVKQTLNFDLLKLAGDVESNPGP (SEQ ID NO: 231) or a Furin-T2A linker RKRR(GSG)EGRGSLLTCGDVEENPGP (SEQ ID NO: 429). In specific embodiments, the transgene is a nucleotide sequence that encodes the following: Signal sequence-heavy chain Fab portion-Furin-2Alinker-signal sequence-light chain Fab portion. See, e.g., FIG. 2B for sequences of GSK933776 Fab expression; FIGS. 9A to 9C for sequences for sevacizumab and LKA-651 Fab expression, respectively; FIGS. 10A to 10D for a sequence for ascrinvacumab, tesidolumab, ravulizumab, and carotuximab Fab expression, respectively; FIG. 11 for sequences for ANX-007 Fab expression; FIGS. 12A to 12C for a sequence for adalimumab, infliximab, and golimumab Fab expression; FIG. 13 for sequence for elezanumab Fab expression; FIGS. 14A and 14B for sequences for NI-301 and PRX-004 Fab expression, respectively; FIG. 15 for a sequence for pamrevlumab Fab expression; FIGS. 16A to 16I for sequences for satralizumab, sarilumab, siltuximab, clazakizumab, sirukumab, olokizumab, gerilimzumab, tocilizumab, and inebilizumab Fab expression, respectively; FIG. 17 for a sequence for etrolizumab Fab expression; FIG. 18 for a sequence for romosozumab Fab expression; FIG. 19 for a sequence for lanadelumab Fab expression; and FIG. 29A to 29F for a sequence for benralizumab, reslizumab, tralokinumab, nemolizumab, omalizumab, and tezepelumab Fab expression respectively. In an alternative embodiment, the construct also comprises the nucleotide sequence encoding the Fc domain for the therapeutic antibody (see Table 7 or FIG. 23) for expression of the full length mAb. In specific embodiments, transgene sequences of expression of lanadelumab are provided in Table 8.

[1261] In a specific embodiment, the constructs described herein comprise the following components: (1) AAV2 inverted terminal repeats that flank the expression cassette; (2) Control elements, which include a) an inducible promoter, e.g., a hypoxia-inducible promoter, or a tissue-specific promoter, e.g. ApoE.hAAT, LSPX1, LMTP6, or CK8 or other disclosed in Table 1, b) a chicken β-actin intron and c) a rabbit β-globin poly A signal; and (3) nucleic acid sequences coding for the heavy and light chains of the VEGF-binding, EpoR-binding, ALK-1-binding, C5-binding, ENG-binding, CC1Q-binding, TNF-α binding, RGMa-binding, TTR-binding, CTGF-binding, IL6R-binding, IL6-binding, CD19-binding, ITGF7-binding, SOST-binding, pKal-binding, IL-6 or IL6R-binding, IL/ILR-binding, IgE-binding, or TSLP-binding Fab, separated by a self-cleaving furin (F)/2A linker or T2A linker, ensuring expression of equal amounts of the heavy and the light chain polypeptides. An exemplary construct is provided in FIG. 1.

[1262] In a specific embodiment, the constructs described herein comprise the following components: (1) AAV2 inverted terminal repeats that flank the expression cassette; (2) Control elements, which include a) an inducible promoter, e.g., a hypoxia-inducible promoter or a tissue-specific promoter (e.g. ApoE.hAAT or LSPX1), b) a chicken β-actin intron and c) a rabbit β-globin poly A signal; and (3) nucleic acid sequences coding for the heavy and light chains of the VEGF-binding, EpoR-binding, ALK-1-binding, C5-binding, ENG-binding, CC1Q-binding, TNF-α binding, RGMa-binding, TTR-binding, CTGF-binding, IL6R-binding, IL6-binding, CD19-binding, ITGF7-binding, SOST-binding, pKal-binding, IL-6 or IL-6R, IL/ILR-binding, IgE-binding, or TSLP-binding Fab, separated by a self-cleaving furin (F)/2A linker or a T2A linker, ensuring expression of equal amounts of the heavy and the light chain polypeptides. An exemplary construct is provided in FIG. 1.

[1263] In specific embodiments, provided are AAV vectors comprising a viral capsid that is at least 95% identical to the amino acid sequence of an AAV8 capsid (SEQ ID NO: 143); and an artificial genome comprising an expression cassette flanked by AAV inverted terminal repeats (ITRs), wherein the expression cassette comprises a transgene encoding an anti-VEGF, anti-EpoR, anti-ALK-1, anti-C5, anti-ENG, anti-CC1Q, anti-TNF-α anti-RGMa, anti-TTR, anti-CTGF, anti-IL6R, anti-IL6, anti-CD19, anti-ITGF7, anti-SOST, anti-pKal, IL-6 or IL-6R, anti-IL/ILR, anti-IgE, or anti-TSLP mAb, or an antigen-binding fragment thereof, operably linked to one or more regulatory sequences that control expression of the transgene in human liver or muscle cells.

[1264] In specific embodiments, provided are AAV vectors comprising a viral capsid that is at least 95% identical to the amino acid sequence of an AAV9 (SEQ ID NO: 144); and an artificial genome comprising an expression cassette flanked by AAV inverted terminal repeats (ITRs), wherein the expression cassette comprises a transgene encoding an anti-VEGF, anti-EpoR, anti-ALK-1, anti-C5, anti-ENG, anti-CC1Q, anti-TNF-α anti-RGMa, anti-TTR, anti-CTGF, anti-IL6R, anti-IL6, anti-CD19, anti-ITGF7, anti-SOST, anti-pKal, IL-6 or IL-6R, anti-IL/ILR, anti-IgE, or anti-TSLP mAb, or an antigen-binding fragment thereof, operably linked to one or more regulatory sequences that control expression of the transgene in human muscle cells.

[1265] In certain embodiments, a rAAV comprises a transgene encoding an anti-kallikrein antibody, such as lanadelumab, and the construct comprises the following components: (1) AAV2 inverted terminal repeats that flank the expression cassette; (2) regulatory control elements, a) promoter/enhancers, such as any one of Sp7 (SEQ ID NO: 329), minSP7 (SEQ ID NO: 329), ApoE.hAAT (SEQ ID NO: 412), LSPX1 (SEQ ID NO: 315), LSPX2 (SEQ ID NO: 316), LTP1 (SEQ ID NO: 317), LTP2 (SEQ ID NO: 318), LTP3 (SEQ ID NO: 319), LMTP6 (SEQ ID NO: 320), LMTP13 (SEQ ID NO: 321), LMTP14 (SEQ ID NO: 322), LMTP15 (SEQ ID NO: 323), LMTP18 (SEQ ID NO: 324), LMTP19 (SEQ ID NO: 325), LMTP20 (SEQ ID NO: 326), LBTP1 (SEQ ID NO: 327), or LBTP2 (SEQ ID NO: 328) as in Table 1, b) a poly A signal, and c) optionally an intron; and (3) nucleic acid sequences coding for the heavy and light chain of lanadelumab (L01 (SEQ ID NO: 141), L02 (SEQ ID NO: 286), or L03 (SEQ ID NO: 287), Table 8) wherein the heavy chain (Fab and Fc region) and the light chain are separated by a self-cleaving furin (F)/F2A (SEQ ID NO: 231) or furin (F)/T2A (SEQ ID NO: 429) or flexible linker, ensuring expression of equal amounts of the heavy and the light chain polypeptides. In specific embodiments, the transgene expressing lanadelumab has the sequence of SEQ ID NO: 435 to 443.

### 5.4.3 Constructs for Delivery to Retinal Cell Types

[1266] Sections 5.3.8, 5.3.9, 5.3.10, 5.3.11, 5.3.15, 5.3.19, and 5.3.20 describe recombinant vectors that contain a transgene encoding a HuPTM mAb or HuPTM Fab (or other antigen binding fragment of the HuPTM mAb) that binds to VEGF, EpoR, Aβ peptides, kallikrein, ALK-1, C5, ENG, CC1Q, TNFαL, IL6R, IL6, and CD19. Such recombinant vectors used for delivering the transgene can have a tropism for one or more human retina cell types. Such vectors can include non-replicating recombinant adeno-associated virus vectors (“rAAV”), e.g., those bearing an AAV8 capsid. Alternatively, an AAV vector bearing an AAV2.7m8 capsid can be used. However, other viral vectors may be used, including but not limited to lentiviral vectors, vaccinia viral vectors, or non-viral expression vectors referred to as “naked DNA” constructs.

[1267] In specific embodiments, provided are constructs for gene therapy administration to a human subject, comprising an AAV vector, which comprises a viral capsid that is at least 95% identical to the amino acid sequence of an AAV8 capsid (SEQ ID NO: 143); and a viral or artificial genome comprising an expression cassette flanked by AAV inverted terminal repeats (ITRs) wherein the expression cassette comprises a transgene encoding the heavy and light chains of the therapeutic antibody, operably linked to one or more regulatory sequences that control expression of the transgene in human cells (e.g., retina cell or liver cell types) that express and deliver the therapeutic antibody in a therapeutically appropriate manner as disclosed herein. In certain embodiments, the encoded AAV8 capsid has the sequence of SEQ ID NO: 143 with 1, 2, 3, 4, 5, 6, 7, 8, 9, 10, 11, 12, 13, 14, 15, 16, 17, 18, 19, 20, 21, 22, 23, 24, 25, 26, 27, 28, 29 or 30 amino acid substitutions, particularly substitutions with amino acid residues found in the corresponding position in other AAV capsids, for example, in the SUBS row of FIG. 21 which provides a comparison of the amino acid sequences of the capsid sequences of various AAVs, highlighting amino acids appropriate for substitution at different positions within the capsid sequence.

[1268] In specific embodiments, provided are constructs for gene therapy administration to a human subject, comprising an AAV vector, which comprises a viral capsid that is at least 95% identical to the amino acid sequence of an AAV2.7m8 capsid (SEQ ID NO: 142); and a viral or artificial genome comprising an expression cassette flanked by AAV inverted terminal repeats (ITRs) wherein the expression cassette comprises a transgene encoding the heavy and light chains of the therapeutic antibody, operably linked to one or more regulatory sequences that control expression of the transgene in human cells (e.g., retina cell or liver cell types) that express and deliver the therapeutic antibody in a therapeutically appropriate manner as disclosed herein. In certain embodiments, the encoded AAV2.7m8 capsid has the sequence of SEQ ID NO: 142 with 1, 2, 3, 4, 5, 6, 7, 8, 9, 10, 11, 12, 13, 14, 15, 16, 17, 18, 19, 20, 21, 22, 23, 24, 25, 26, 27, 28, 29 or 30 amino acid substitutions, particularly substitutions with amino acid residues found in the corresponding position in other AAV capsids, for example, in the SUBS row of FIG. 21 which provides a comparison of the amino acid sequences of the capsid sequences of various AAVs, highlighting amino acids appropriate for substitution at different positions within the capsid sequence.

[1269] In some embodiments, the HuPTM mAb or antigen binding fragment thereof, including the HuPTM Fab transgene should be controlled by appropriate expression control elements for expression of the HuPTM Fab or HuPTM Mab in human retina or liver cell types, for example, CB7 promoter (a chicken β-actin promoter and CMV enhancer, SEQ ID NO: 411), or tissue-specific promoters such as RPE-specific promoters e.g., the RPE65 promoter, or cone-specific promoters, e.g., the opsin promoter, or liver specific promoters, such as, the TBG (Thyroxine-binding Globulin) promoter (SEQ ID NO: 423), the Aβ0A2 promoter, the SERPINA1 (hAAT) promoter, the ApoE.hAAT promoter (SEQ ID NO: 412), or the MIR122 promoter, or inducible promoters, for example, hypoxia-induced promoters and drug inducible promoters such as promoters induced by rapamycin and related agents; and can include other expression control elements that enhance expression of the transgene driven by the vector (e.g., introns such as the chicken β-actin intron, minute virus of mice (MVM) intron, human factor IX intron (e.g., FIX truncated intron 1), β-globin splice donor/immunoglobulin heavy chain spice acceptor intron, adenovirus splice donor/immunoglobulin splice acceptor intron, SV40 late splice donor/splice acceptor (19S/16S) intron, and hybrid adenovirus splice donor/IgG splice acceptor intron and polyA signals such as the rabbit β-globin polyA signal, human growth hormone (hGH) polyA signal, SV40 late polyA signal, synthetic polyA (SPA) signal, and bovine growth hormone (bGH) polyA signal). See, e.g., Powell and Rivera-Soto, 2015, Discov. Med., 19(102):49-57. In some embodiments, transgene expression is controlled by tissue-specific promoters or regulatory elements that promote tissue-specificity, for example, for liver-specific expression, LSPX1 (SEQ ID NO: 315), LSPX2 (SEQ ID NO: 316), LTP1 (SEQ ID NO: 317), LTP2 (SEQ ID NO: 318), or LTP3 (SEQ ID NO: 319), for liver and muscle expression, LMTP6 (SEQ ID NO: 320), LMTP13 (SEQ ID NO: 321), LMTP14 (SEQ ID NO: 322), LMTP15 (SEQ ID NO: 323), LMTP18 (SEQ ID NO: 324), LMTP19 (SEQ ID NO: 325), or LMTP20 (SEQ ID NO: 326), or for liver and bone expression, LBTP1 (SEQ ID NO: 327) or LBTP2 (SEQ ID NO: 328), the sequences of which are provided in Table 1.

[1270] Gene therapy constructs for antibodies or Fabs are designed such that both the heavy and light chains are expressed. More specifically, the heavy and light chains should be expressed at about equal amounts, in other words, the heavy and light chains are expressed at approximately a 1:1 ratio of heavy chains to light chains. The coding sequences for the heavy and light chains can be engineered in a single construct in which the heavy and light chains are separated by a cleavable linker or IRES so that separate heavy and light chain polypeptides are expressed. The leader sequence for each of the heavy and light chains is, e.g., MYRMQLLLLIALSLALVTNS (SEQ ID NO: 146). Section 5.1.5, supra, provides specific IRES, 2A, and other linker sequences that can be used with the methods and compositions provided herein. In specific embodiments, the linker is a Furin-2A linker, for example a Furin-F2A linker RKRR(GSG)APVKQTLNFDLLKLAGDVESNPGP (SEQ ID NO: 231) or a Furin-T2A linker RKRR(GSG)EGRGSLLTCGDVEENPGP (SEQ ID NO: 429). In specific embodiments, the transgene is a nucleotide sequence that encodes the following: Signal sequence-heavy chain Fab portion-Furin-(F/T)2A linker-signal sequence-light chain Fab portion. See FIGS. 2A-C for sequences for solanezumab, GSK933776, and lecanemab Fab expression, respectively; FIGS. 9A to 9C for sequences for sevacizumab and LKA-651 Fab expression, respectively; FIGS. 10A to 10D for a sequence for ascrinvacumab, tesidolumab, ravulizumab, and carotuximab Fab expression, respectively; FIG. 11 for sequences for ANX-007 Fab expression; FIGS. 12A to 12C for a sequence for adalimumab, infliximab, and golimumab Fab expression, respectively; FIGS. 16A to 16I for sequences for satralizumab, sarilumab, siltuximab, clazakizumab, sirukumab, olokizumab, gerilimzumab, and tocilizumab, inebilizumab Fab expression, respectively; and FIG. 19 for lanadelumab Fab expression (and see also Table 8 for nucleotide sequences encoding lanadelumab and lanadelumab transgenes). In an alternative embodiment, the construct also comprises the nucleotide sequence encoding the Fc domain for the therapeutic antibody (see Table 7 or FIG. 23) for expression of the full length mAb (and Table 8 for lanadelumab).

[1271] In a specific embodiment, the constructs described herein comprise the following components: (1) AAV2 inverted terminal repeats that flank the expression cassette; (2) Control elements, which include a) the CB7 promoter, comprising the CMV enhancer/chicken β-actin promoter, b) a chicken β-actin intron and c) a rabbit β-globin poly A signal; and (3) nucleic acid sequences coding for the heavy and light chains of the VEGF-binding, EpoR-binding, anti-Aβ, ALK-1-binding, C5-binding, ENG-binding, CC1Q-binding, TNFα-binding, kallikrein-binding, IL6R-binding, IL6-binding, and CD19-binding Fab, separated by a self-cleaving furin (F)/2A linker, ensuring expression of equal amounts of the heavy and the light chain polypeptides. An exemplary construct is provided in FIG. 1.

[1272] In another embodiment, the constructs described herein comprise the following components: (1) AAV2 inverted terminal repeats that flank the expression cassette; (2) Control elements, which include a) the CB7 promoter, comprising the CMV enhancer/chicken β-actin promoter, b) a chicken β-actin intron and c) a rabbit β-globin poly A signal; and (3) nucleic acid sequences coding for the heavy and light chains of the VEGF-binding, EpoR-binding, Aβ-binding, ALK-1-binding, C5-binding, ENG-binding, CC1Q-binding, TNFα-binding, kallikrein-binding, IL6R-binding, IL6-binding, and CD19-binding Fab, separated by flexible peptide linker, ensuring proper folding and solubility.

[1273] In specific embodiments, provided are AAV vectors comprising a viral capsid that is at least 95% identical to the amino acid sequence of an AAV8 capsid (SEQ ID NO: 143) or of an AAV2.7m8 (SEQ ID NO: 142); and an artificial genome comprising an expression cassette flanked by AAV inverted terminal repeats (ITRs), wherein the expression cassette comprises a transgene encoding an anti-VEGF, anti-EpoR, anti-Aβ, anti-ALK-1, anti-C5, anti-ENG, anti-CC1Q, anti-TNFα, anti-kallikrein, anti-IL6R, anti-IL6, and anti-CD19 mAb, or an antigen-binding fragment thereof, operably linked to one or more regulatory sequences that control expression of the transgene in one or more retina cell types (such as human photoreceptor cells (cone cells, rod cells); horizontal cells; bipolar cells; amarcrine cells; retina ganglion cells (midget cell, parasol cell, bistratified cell, giant retina ganglion cell, photosensitive ganglion cell, and muller glia); and retinal pigment epithelial cells).

### 5.5 Dose Administration

### 5.5.1Administration for Delivering to CNS

[1274] Sections 5.3.1, 5.3.2, 5.3.3, 5.3.4, 5.3.5., 5.3.6., and 5.3.7. describe recombinant vectors that contain a transgene encoding a HuPTM mAb or HuPTM Fab (or other antigen binding fragment of the HuPTM mAb) that binds to Aβ, sortilin, Tau protein, SEMA4D, alpha-synuclein, SOD1, and CGRPR, respectively. Therapeutically effective doses of any such recombinant vector should be administered in any manner such that the recombinant vector enters the CNS, e.g. by introducing the recombinant vector into the cerebral spinal fluid (CSF). In specific, embodiments, the vector is administered intrathecally, specifically intracisternally (such as to the cisterna magna) or, alternatively, lumbar delivery. Alternatively, the recombinant vector may be administered intravenously. In particular, recombinant AAV9 vectors have been shown to cross the blood-brain barrier and, as such, may be useful to deliver the anti-An, anti-sortilin, anti-Tau, anti-SEMA4D, anti-alpha-synuclein, anti-SOD1, or anti-CGRPR, antibody transgene product to the CNS. Specifically, a scAAV9 may be particularly useful for intravenous administration. Intrathecal, including intracisternal or lumbar administration, or intravenous administration should result expression of the soluble transgene product in cells of the CNS. The expression of the transgene product (e.g., the encoded anti-Aβ, anti-sortilin, anti-Tau, anti-SEMA4D, anti-alpha-synuclein, anti-SOD1, or anti-CGRPR antibody) results in delivery and maintenance of the transgene product in the CNS. Because the transgene product is continuously produced, maintenance of lower concentrations can be effective. The concentration of the transgene product can be measured in patient samples of the CSF.

[1275] Pharmaceutical compositions suitable for intrathecal, intracisternal, lumbar or intravenous administration comprise a suspension of the recombinant vector comprising the transgene encoding the anti-Aβ, anti-sortilin, anti-Tau, anti-SEMA4D, anti-alpha-synuclein, anti-SOD1, or anti-CGRPR antibody, or antigen-binding fragment thereof, in a formulation buffer comprising a physiologically compatible aqueous buffer. The formulation buffer can comprise one or more of a polysaccharide, a surfactant, polymer, or oil.

### 5.5.2 Administration for Delivering to Liver or Muscle Tissue

[1276] Sections 5.3.8, 5.3.9, 5.3.10, 5.3.11, 5.3.12, 5.3.13, 5.3.14, 5.3.15, 5.3.16, 5.3.17, 5.3.18, 5.3.19, 5.3.20, and 5.3.21, describe recombinant vectors that contain a transgene encoding a HuPTM mAb or HuPTM Fab (or other antigen binding fragment of the HuPTM mAb) that binds to VEGF, EpoR, Aβ, ALK-1, C5, ENG, CC1Q, TNFα, RGMa, TTR, CTGF, IL6R, IL6, CD19, ITGF7, SOST, pKal, IL/ILR, IgE, or TSLP. Therapeutically effective doses of any such recombinant vector should be administered in any manner such that the recombinant vector enters the liver or muscle (e.g., skeletal muscle), e.g. by introducing the recombinant vector into the bloodstream. Alternatively, the vector may be administered directly to the liver through hepatic blood flow, e.g., via the suprahepatic veins or via the hepatic artery. In specific, embodiments, the vector is administered subcutaneously, intramuscularly or intravenously. Intramuscular, subcutaneous, intravenous or hepatic administration should result in expression of the soluble transgene product in cells of the liver or muscle. Alternatively, the vector may be administered directly to the liver through hepatic blood flow, e.g., via the suprahepatic veins or via the hepatic artery. The expression of the transgene product (e.g., the encoded anti-VEGF, anti-EpoR, anti-Aβ, anti-ALK1, anti-C5, anti-ENG, anti-CC1Q, anti-TNFα, anti-RGMa, anti-TTR, anti-CTGF, anti-IL6R, anti-CD19, anti-ITGF7, anti-SOST, anti-pKal, anti-IL/ILR, anti-IgE, or anti-TSLP antibody) results in delivery and maintenance of the transgene product in the liver or muscle.

[1277] In specific embodiments, doses that maintain a plasma concentration of the anti-TNFα antibody transgene product at a Cₘᵢₙ of at least 0.5 μg/mL or at least 1 μg/mL (e.g., Cₘᵢₙ of 1 to 10 μg/ml, 3 to 30 μg/ml or 5 to 15 μg/mL or 5 to 30 μg/mL) are provided.

[1278] In specific embodiments, doses that maintain a plasma concentration of the adalimumab antibody, or antigen-binding fragment thereof, at a Cₘᵢₙ of at least 5 μg/mL (e.g., Cₘᵢₙ of 5 to 10 μg/ml or 10 to 20 μg/ml), preferably a Cₘᵢₙ of about 8 μg/mL to 9 μg/mL are provided.

[1279] In specific embodiments, doses that maintain a plasma concentration of the infliximab antibody, or antigen-binding fragment thereof, at a Cₘᵢₙ of at least 2 μg/mL (e.g., Cₘᵢₙ of 2 to 10 μg/ml or 10 to 20 μg/ml), preferably at a Cₘᵢₙ of about 5 μg/mL to 6 μg/mL, are provided.

[1280] In specific embodiments, doses that maintain a plasma concentration of the anti-CD19 transgene product at a Cₘᵢₙ of at least 1 μg/ml (e.g., Cₘᵢₙ of 1 to 10 μg/ml or 10 to 100 μg/ml or 100 to 300 μg/ml) are provided.

[1281] In specific embodiments, doses that maintain a plasma concentration of the anti-SOST transgene product at a Cₘᵢₙ of at least 1 mg/ml (e.g., C. of 1 to 10 μg/ml or 10 to 100 μg/ml or 100 to 200 μg/ml) are desired.

[1282] In specific embodiments, doses that maintain a plasma concentration of the sarilumab antibody, or antigen-binding fragment thereof, at a Cₘᵢₙ of at least 5 μg/ml (e.g., C. of 5 to 20 μg/ml or 20 to 50 μg/ml), preferably at a Cₘᵢₙ of about 15 μg/mL to 20 μg/mL, are provided.

[1283] In specific embodiments, doses that maintain a plasma concentration of the tocilizumab antibody, or antigen-binding fragment thereof, at a Cₘᵢₙ of at least 1 μg/ml (e.g., Cₘᵢₙ of 1 to 10 μg/ml or 10 to 20 μg/ml) are provided.

[1284] In specific embodiments, doses that maintain a plasma concentration of the siltuximab antibody, or an antigen-binding fragment thereof, at a Cₘᵢₙ of at least 20 μg/ml (e.g., Cₘᵢₙ of 20 to 100 μg/ml or 100 to 200 μg/ml), preferably at a Cₘᵢₙ of about 80 μg/mL to 90 μg/mL, are provided.

[1285] In specific embodiments, doses that maintain a plasma concentration of the anti-CTGF antibody transgene product at a Cₘᵢₙ of at least 100 μg/mL (e.g., Cₘᵢₙ of 100 to 200 μg/ml or 200 to 300 μg/mL) are provided.

[1286] In specific embodiments, doses that maintain a plasma concentration of the anti-ENG antibody transgene product at a Cₘᵢₙ of at least 10 μg/mL are desired, such as Cₘᵢₙ of 10 to 100 μg/ml or 100 to 300 μg/ml or 300 to 600 μg/ml are provided.

[1287] In specific embodiments, doses that maintain a plasma concentration of the anti-C5 antibody transgene product at a Cₘᵢₙ of at least 10 μg/mL (e.g., Cₘᵢₙ of 10 to 100 μg/ml or 100 to 200 mg/mL or 200 to 300 mg/mL) are provided.

[1288] In specific embodiments, doses that maintain a plasma concentration of the ravulizumab antibody, or antigen-binding fragment thereof, at a Cₘᵢₙ of at least 200 μg/mL (e.g., Cₘᵢₙ of 200 to 300 μg/ml or 300 to 400 μg/mL or 400 to 600 μg/mL), preferably at a Cₘᵢₙ of about 350 to 450 μg/mL in complement-inhibitor naïve patients and at a Cₘᵢₙ of about 450 to 550 μg/mL are provided.

[1289] In specific embodiments, doses that maintain a plasma concentration of the anti-IL/ILR antibody transgene product at a Cₘᵢₙ of at least 0.1 μg/mL (e.g., C. of 0.1 to 10 μg/ml or 10 to 20 μg/mL or 20 to 100 μg/mL) are provided.

[1290] In specific embodiments, doses that maintain a plasma concentration of the anti-IgE antibody transgene product at a Cₘᵢₙ of at least 100 μg/mL (e.g., Cₘᵢₙ of 100 to 200 μg/ml or 200 to 300 mg/mL or 300 to 400 μg/mL) are provided.

[1291] In specific embodiments, doses that maintain a plasma concentration of the anti-TSLP antibody transgene product at a Cₘᵢₙ of at least 70 μg/mL (e.g., Cₘᵢₙ of 70 to 150 μg/ml or 100 to 200 mg/mL or 200 to 350 mg/mL) are provided.

[1292] In specific embodiments, doses that maintain a plasma concentration of the lanadelumab antibody, or antigen-binding fragment thereof, at a Cₘᵢₙ of at least 10 μg/mL (e.g., Cₘᵢₙ of 10 to 50 μg/ml or 50 to 100 μg/mL or 100 to 200 μg/mL), preferably at a Cₘᵢₙ of about 20 to 30 μg/mL, are provided.

[1293] However, in all cases because the transgene product is continuously produced, maintenance of lower concentrations can be effective. Notwithstanding, because the transgene product is continuously produced, maintenance of lower concentrations can be effective. The concentration of the transgene product can be measured in patient blood serum samples.

[1294] Pharmaceutical compositions suitable for intravenous, intramuscular, subcutaneous or hepatic administration comprise a suspension of the recombinant vector comprising the transgene encoding the anti-VEGF, anti-EpoR, anti-Aβ, anti-ALK-1, anti-C5, anti-ENG, anti-CC1Q, anti-TNFα, anti-RGMa, anti-TTR, anti-CTGF, anti-IL6R, anti-IL6, anti-CD19, anti-ITGF7, anti-SOST, anti-pKal, anti-IL/ILR, anti-IgE, or anti-TSLP antibody, or antigen-binding fragment thereof, in a formulation buffer comprising a physiologically compatible aqueous buffer. The formulation buffer can comprise one or more of a polysaccharide, a surfactant, polymer, or oil.

### 5.5.3 Administration for Delivering to Retinal Type Cells

[1295] Therapeutically effective doses of the recombinant vector should be administered in any manner such that the recombinant vector enters the retina, e.g., by introducing the recombinant vector directly into the eye. In specific, embodiments, the vector is administered subretinally (a surgical procedure performed by trained retinal surgeons that involves a partial vitrectomy with the subject under local anesthesia, and injection of the gene therapy into the retina; see, e.g., Campochiaro et al., 2016, Hum Gen Ther September 26 epub:doi: 10.1089/hum.2016.117, which is incorporated by reference herein in its entirety), or intravitreally, or suprachoroidally such as by microinjection or microcannulation. (See, e.g., Patel et al., 2012, Invest Ophth & Vis Sci 53:4433-4441; Patel et al., 2011, Pharm Res 28:166-176; Olsen, 2006, Am J Ophth 142:777-787 each of which is incorporated by reference in its entirety). Subretinal, intravitreal or suprachoroidal administration should result in expression of the soluble transgene product in one or more of the following retinal cell types: human photoreceptor cells (cone cells, rod cells); horizontal cells; bipolar cells; amarcrine cells; retina ganglion cells (midget cell, parasol cell, bistratified cell, giant retina ganglion cell, photosensitive ganglion cell, and muller glia); and retinal pigment epithelial cells.

[1296] The expression of the transgene product (e.g., the encoded anti-VEGF, anti-EpoR, anti-anti-pKal, anti-ALK-1, anti-C5, anti-ENG, anti-CC1Q, anti-TNFα, anti-IL6R, anti-IL6, and anti-CD19 Antibody) results in delivery and maintenance of the transgene product in the retina. Pharmaceutical compositions suitable for administration comprise a suspension of the recombinant vector comprising the transgene encoding the anti-VEGF, anti-EpoR, anti-Aβ, anti-pKal, anti-ALK-1, anti-C5, anti-ENG, anti-CC1Q, anti-TNFα, anti-IL6R, anti-IL6, and anti-CD19 antibody, or antigen-binding fragment thereof, in a formulation buffer comprising a physiologically compatible aqueous buffer. The formulation buffer can comprise one or more of a polysaccharide, a surfactant, polymer, or

[1297] In specific embodiments, doses that maintain a plasma concentration of the adalimumab antibody, or antigen-binding fragment thereof, at a Cₘᵢₙ of at least 5 μg/mL (e.g., Cₘᵢₙ of 5 to 10 μg/ml or 10 to 20 μg/ml), preferably a Cₘᵢₙ of about 8 μg/mL to 9 μg/mL are provided. In specific embodiments, doses and routes of administration of a vector comprising the transgene encoding an adalimumab antibody, or antigen-binding fragment thereof, should result in expression of the adalimumab antibody, or antigen-binding fragment thereof, that achieve and maintain an intravitreal concentration of the adalimumab antibody, or antigen-binding fragment thereof, at an equivalent level to the intravitreal concentration achieved by monthly intravitreal injections of Humira at a dose of 1.5 mg.

[1298] In specific embodiments, doses that maintain a plasma concentration of the infliximab antibody, or antigen-binding fragment thereof, at a Cₘᵢₙ of at least 2 μg/mL (e.g., Cₘᵢₙ of 2 to 10 mg/ml or 10 to 20 μg/ml), preferably at a Cₘᵢₙ of about 5 μg/mL to 6 μg/mL, are provided.

[1299] In specific embodiments, doses that maintain a plasma concentration of the sarilumab antibody, or antigen-binding fragment thereof, at a Cₘᵢₙ of at least 5 mg/ml (e.g., C. of 5 to 20 mg/ml or 20 to 50 μg/ml), preferably at a Cₘᵢₙ of about 15 μg/mL to 20 μg/mL, are provided.

[1300] In specific embodiments, doses and routes of administration of a vector comprising the transgene encoding an satralizumab antibody, or antigen-binding fragment thereof, should result in expression of the satralizumab antibody, or antigen-binding fragment thereof, that achieve and maintain an intravitreal concentration of the satralizumab antibody, or antigen-binding fragment thereof, at an equivalent level to the intravitreal concentration achieved by monthly subcutaneous injections of SA237 (Roche) at a dose of 120 mg.

[1301] In specific embodiments, doses that maintain a plasma concentration of the tocilizumab antibody, or antigen-binding fragment thereof, at a Cₘᵢₙ of at least 1 μg/ml (e.g., C. of 1 to 10 μg/ml or 10 to 20 μg/ml) are provided. In specific embodiments, doses and routes of administration of a vector comprising the transgene encoding a tocilizumab antibody, or antigen-binding fragment thereof, should result in expression of the tocilizumab antibody, or antigen-binding fragment thereof, that achieve and maintain a systemic concentration of the adalimumab antibody, or antigen-binding fragment thereof, at an equivalent level to the systemic concentration achieved by monthly intravenous injections of RoActemra at a dose of 4 mg/kg or 8 mg/kg.

[1302] In specific embodiments, doses that maintain a plasma concentration of the siltuximab antibody, or an antigen-binding fragment thereof, at a Cm, of at least 20 μg/ml (e.g., Cₘᵢₙ of 20 to 100 μg/ml or 100 to 200 μg/ml), preferably at a Cₘᵢₙ of about 80 μg/mL to 90 μg/mL, are provided.

[1303] In specific embodiments, doses that maintain a plasma concentration of the ravulizumab antibody, or antigen-binding fragment thereof, at a Cₘᵢₙ of at least 200 μg/mL (e.g., Cₘᵢₙ of 200 to 300 μg/ml or 300 to 400 μg/mL or 400 to 600 μg/mL), preferably at a Cₘᵢₙ of about 350 to 450 μg/mL in complement-inhibitor naïve patients and at a Cₘᵢₙ of about 450 to 550 μg/mL are provided.

[1304] In specific embodiments, doses that maintain a plasma concentration of the lanadelumab antibody, or antigen-binding fragment thereof, at a Cₘᵢₙ of at least 10 μg/mL (e.g., Cₘᵢₙ Of 10 to 50 μg/ml or 50 to 100 μg/mL or 100 to 200 μg/mL), preferably at a Cₘᵢₙ of about 20 to 30 μg/mL, are provided.

### 5.6 Constructs and Methods for Expression of HuPTM mAb

[1305] Examples 36 and 37 demonstrate that full length heavy and light chains of lanadelumab were expressed from an AAV vector transgene in human HEK293 cells and secreted into the cell supernatant (FIGS. 24B-24D). Mice administered recombinant AAV8 and recombinant AAV9 vectors that carry a transgene encoding the full length heavy and light chains of lanadelumab had lanadelumab present in serum as detectable by ELISA seven weeks after administration (FIG. 25). Accordingly, provided herein are AAV constructs, vectors, methods of manufacture and methods of treatment comprising transgenes that encode a full length heavy chain (including the heavy chain variable domain, the heavy chain constant domain 1 (C_{H}1), the hinge and Fc domain) and a full length light chain (light chain variable domain and light chain constant domain) that upon expression associate to form antigen-binding antibodies with Fc domains. The recombinant AAV constructs express the intact (i.e., full length) or substantially intact HuPTM mAb in a cell, cell culture, or in a subject. (“Substantially intact” refers to mAb having a sequence that is at least 95% identical to the full-length mAb sequence.) The nucleotide sequences encoding the heavy and light chains may be codon optimized for expression in human cells and have reduced incidence of CpG dimers in the sequence to promote expression in human cells. The transgenes may encode any full-length antibody. In preferred embodiments, the transgenes encode a full-length form of any of the therapeutic antibodies disclosed herein, for example, the Fab fragments of which depicted in FIGS. 2A-2C, 3, 4A-4C, 5, 6A-6C, 7A-7B, 8A-8C, 9A-9C, 10A-10D, 11, 12A-12C, 13, 14A-14B, 15, 16A-16I, 17, 18, 19, and 29A-29F herein and including, in certain embodiments, the associated Fc domain provided in Table 7. In other embodiments, the transgenes encode the full-length forms of the Fab fragments of therapeutic antibodies depicted in one of FIGS. 2A-2F, 3A-3E, 4A, 4B, 5A-5C, 6, 7A, 7B, 8A-8H, 9A or 9B of PCT application no. PCT/US2018/056346, filed Oct. 17, 2018, incorporated herein by reference (which Figures are included as an Appendix hereto), with an Fc domain.

[1306] The full length mAb encoded by the transgene described herein preferably have the Fc domain of the full-length therapeutic antibody or is an Fc domain of the same type of immunoglobulin as the therapeutic antibody to be expressed. In certain embodiments, the Fc region is an IgG Fc region, but in other embodiments, the Fc region may be an IgA, IgD, IgE, or IgM. The Fc domain is preferably of the same isotype as the therapeutic antibody to be expressed, for example, if the therapeutic antibody is an IgG1 isotype, then the antibody expressed by the transgene comprises an IgG1 Fc domain. The antibody expressed from the transgene may have an IgG1, IgG2, IgG3 or IgG4 Fc domain.

[1307] The Fc region of the intact mAb has one or more effector functions that vary with the antibody isotype. The effector functions can be the same as that of the wild-type or the therapeutic antibody or can be modified therefrom to add, enhance, modify, or inhibit one or more effector functions using the Fc modifications disclosed in Section 5.1.9, infra. In certain embodiments, the HuPTM mAb transgene encodes a mAb comprising an Fc polypeptide comprising an amino acid sequence that is at least 85%, 86%, 87%, 88%, 89%, 90%, 91%, 92%, 93%, 94%, 95%, 96%, 97%, 98% or 99% identical to the sequence set forth in the Fc domain polypeptides of the therapeutic antibodies described herein as set forth in Table 7 or an exemplary Fc domain of an IgG1, IgG2 or IgG4 isotype as set forth in FIG. 23. In specific embodiments, the HuPTM mAb comprises a Fc polypeptide comprising an amino acid sequence of an Fc polypeptide in Table 7 or FIG. 23 with 1, 2, 3, 4, 5, 6, 7, 8, 9, 10, 11, 12, 13, 14, 15 or more amino acid substitutions, insertions or deletions. In some embodiments, the HuPTM mAb comprises a Fc polypeptide of a sequence that is a variant of the Fc polypeptide sequence in Table 7 or FIG. 23 in that the sequence has been modified with one or more of the techniques described in Section 5.1.9, infra, to alter the Fc polypeptide's effector function.

[1308] In specific embodiments, provided are recombinant AAV constructs such as the construct shown in FIG. 1 or FIG. 24A, for gene therapy administration to a human subject in order to express an intact or substantially intact HuPTM mAb in the subject. Gene therapy constructs are designed such that both the heavy and light chains are expressed in tandem from the vector including the Fc domain polypeptide of the heavy chain. In certain embodiments, the transgene encodes a transgene with heavy and light chain Fab fragment polypeptides as shown in one of FIGS. 2A-2C, 3, 4A-4C, 5, 6A-6C, 7A-7B, 8A-8C, 9A-9C, 10A-10D, 11, 12A-12C, 13, 14A-14B, 15, 16A-16I, 17, 18, 19, and 29A-29F or FIGS. 2A-2F, 3A-3E, 4A, 4B, 5A-5C, 6, 7A, 7B, 8A-8H, 9A or 9B of PCT application no. PCT/US2018/056346, filed Oct. 17, 2018 (copies of these figures are included in an Appendix hereto and are incorporated herein by reference also), yet have a heavy chain that further comprises an Fc domain polypeptide C terminal to the hinge region of the heavy chain (including the corresponding Fc domain set forth in Table 7 or an IgG1, IgG2 or IgG4 Fc domain as in FIG. 23). In specific embodiments, the transgene is a nucleotide sequence that encodes the following: Signal sequence-heavy chain Fab portion (including hinge region)-heavy chain Fc polypeptide-Furin-2A linker-signal sequence-light chain Fab portion.

[1309] Provided are recombinant AAV vectors that comprise the constructs encoding the full-length antibodies. The rAAVs include but are not limited to AAV based vectors comprising capsid components from one or more of AAV1, AAV2, AAV3, AAV4, AAV5, AAV6, AAV7, AAV8, AAV9, AAV10, AAV11, AAVrh10 or AAVrh20. In preferred embodiments, AAV based vectors provided herein comprise capsids from one or more of AAV8, AAV9, AAV10, AAV11, AAVrh10 or AAVrh20 serotypes. The AAV serotype may be advantageously selected for tropism to a particular tissue type as detailed herein.

[1310] The rAAV vectors that encode and express the full-length therapeutic antibodies may be administered to treat or prevent or ameliorate symptoms of a disease or condition amenable to treatment, prevention or amelioration of symptoms with the therapeutic antibodies. Also provided are methods of expressing HuPTM mAbs in human cells using the rAAV vectors and constructs encoding them.

### 5.6.1. Full Length Expression of HuPTM mAb in CNS Cells

[1311] In a specific embodiments for expressing an intact or substantially intact mAb in retinal cell types, the constructs described herein comprise the following components: (1) AAV2 inverted terminal repeats that flank the expression cassette; (2) Control elements, which include a) the CB7 promoter, comprising the CMV enhancer/chicken β-actin promoter, b) a chicken β-actin intron and c) a rabbit β-globin poly A signal; and (3) nucleic acid sequences coding for the heavy chain Fab of an anti-An mAb (e.g., solanezumab, lecanemab, and GSK933776), anti-sortilin mAb (e.g., AL-001), anti-Tau protein mAb (e.g., ABBV-8E12, UCB-0107, NI-105 (BIIB076), and aTAU), anti-SEMA4D mAb (e.g., VX15/2503), anti-alpha-synuclein mAb (e.g., prasinezumab, NI-202 (BIIB054) and MED-1341), anti-SOD1 mAb (e.g., NI-204), or anti-CGRPR mAb (e.g., eptinezumab, fremanezumab, and galcanezumab, the Fc polypeptide may be the Fc associated with the therapeutic antibody (Table 7) or of the same isotype as the native form of the therapeutic antibody, such as an IgG isotype amino acid sequence from FIG. 23; and the light chain Fab of an anti-Aβ mAb (e.g., solanezumab, lecanemab, and GSK933776), anti-sortilin mAb (e.g., AL-001), anti-Tau protein mAb (e.g., ABBV-8E12, UCB-0107, NI-105 (BIIB076), and aTAU), anti-SEMA4D mAb (e.g., VX15/2503), anti-alpha-synuclein mAb (e.g., prasinezumab, NI-202 (BIIB054) and MED-1341), anti-SOD1 mAb (e.g., NI-204), or anti-CGRPR mAb (e.g., eptinezumab, fremanezumab, and galcanezumab, wherein the heavy chain (Fab and Fc polypeptide) and the light chain are separated by a self-cleaving furin (F)/2A or T2A or flexible linker, ensuring expression of equal amounts of the heavy and the light chain polypeptides. An exemplary construct is provided in FIG. 1.

[1312] In specific embodiments, provided are AAV vectors comprising a viral capsid that is at least 95% identical to, or is identical to, the amino acid sequence of an AAV9 capsid (SEQ ID NO: 144) or AAVrh10 (SEQ ID NO: 145); and an artificial genome comprising an expression cassette flanked by AAV inverted terminal repeats (ITRs), wherein the expression cassette comprises a transgene encoding an intact or substantially intact anti-Aβ, anti-sortilin, anti-Tau protein, anti-SEMA4D, anti-alpha-synuclein, anti-SOD1, or anti-CGRPR mAb, operably linked to one or more regulatory sequences that control expression of the transgene in human CNS cells. Methods of producing HuPTM mAbs and methods of treatment, prevention or amelioration of symptoms of a disease or conditions amenable to treatment, prevention or amelioration of symptoms with the therapeutic antibody by administration of an rAAV encoding the HuPTM mAb or with the HuPTM mAb are also provided.

### 5.6.2 Full Length Expression of mAB in Liver or Muscle Cells

[1313] In a specific embodiments for expressing an intact or substantially intact mAb in muscle or liver cell types, the constructs described herein comprise the following components: (1) AAV2 inverted terminal repeats that flank the expression cassette; (2) Control elements, which include a) an inducible promoter, preferably a hypoxia-inducible promoter, b) a chicken β-actin intron and c) a rabbit β-globin poly A signal; and (3) nucleic acid sequences coding for the heavy chain Fab of an anti-VEGF (e.g., sevacizumab), anti-EpoR (e.g., LKA-651), anti-ALK1 (e.g., ascrinvacumab), anti-C5 (e.g., tesidolumab and ravulizumab), anti-endoglin (e.g., carotuximab), anti-CC1Q (e.g., ANX-007), anti-TNFα (e.g., adalimumab, infliximab, and golimumab), anti-RGMa (e.g., elezanumab), anti-TTR (e.g., NI-301 and PRX-004), anti-CTGF (e.g., pamrevlumab), anti-IL6R (e.g., satralizumab, sarilumab, and tocilizumab), anti-IL6 (e.g. siltuximab, clazakizumab, sirukumab, olokizumab, and gerilimzumab), anti-CD19 (e.g., inebilizumab), anti-ITGF7 mAb (e.g., etrolizumab), anti-SOST mAb (e.g., romosozumab), anti-pKal mAb (e.g., lanadelumab), anti-IL/ILR (e.g. benralizumab, reslizumab, tralokinumab, and nemolizumab), anti-IgE (e.g. omalizumab), or anti-TSLP (e.g. Tezepelumab); an Fc polypeptide associated with the therapeutic antibody (Table 7) or of the same isotype as the native form of the therapeutic antibody, such as an IgG isotype amino acid sequence from FIG. 23; and the light chain of an anti-VEGF (e.g., sevacizumab), anti-EpoR (e.g., LKA-651), anti-ALK1 (e.g., ascrinvacumab), anti-C5 (e.g., tesidolumab and ravulizumab), anti-CD105 or anti-ENG (e.g., carotuximab), anti-CC1Q (e.g., ANX-007), anti-TNFα (e.g., adalimumab, infliximab, and golimumab), anti-RGMa (e.g., elezanumab), anti-TTR (e.g., NI-301 and PRX-004), anti-CTGF (e.g., pamrevlumab), anti-IL6R (e.g., satralizumab, sarilumab, and tocilizumab), anti-IL6 (e.g. siltuximab, clazakizumab, sirukumab, olokizumab, and gerilimzumab), anti-CD19 (e.g., inebilizumab), anti-ITGF7 mAb (e.g., etrolizumab), anti-SOST mAb (e.g., romosozumab), anti-pKal mAb (e.g., lanadelumab), anti-IL/ILR (e.g. benralizumab, reslizumab, tralokinumab, and nemolizumab), anti-IgE (e.g. omalizumab), or anti-TSLP (e.g. Tezepelumab); wherein the heavy chain (Fab and Fc region) and the light chain are separated by a self-cleaving furin (F)/F2A or T2A or flexible linker, ensuring expression of equal amounts of the heavy and the light chain polypeptides. An exemplary construct is provided in FIG. 1.

[1314] In specific embodiments, provided are AAV vectors comprising a viral capsid that is at least 95% identical to the amino acid sequence of an AAV8 capsid (SEQ ID NO: 143); and an artificial genome comprising an expression cassette flanked by AAV inverted terminal repeats (ITRs), wherein the expression cassette comprises a transgene encoding an intact or substantially intact anti-VEGF, anti-EpoR, anti-ALK-1, anti-Aβ anti-C5, anti-ENG, anti-CC1Q, anti-TNFα, anti-RGMa, anti-TTR, anti-CTGF, anti-CD19, anti-ITGF7, anti-SOST, anti-pKal mAb, anti-IL6R, anti-IL6, anti-IL/ILR, anti-IgE, or anti-TSLP; operably linked to one or more regulatory sequences that control expression of the transgene in human liver or muscle cells.

[1315] In specific embodiments, provided are AAV vectors comprising a viral capsid that is at least 95% identical to the amino acid sequence of an AAV9 (SEQ ID NO: 144); and an artificial genome comprising an expression cassette flanked by AAV inverted terminal repeats (ITRs), wherein the expression cassette comprises a transgene encoding an intact or substantially intact anti-VEGF, anti-EpoR, anti-Aβ, anti-ALK-1, anti-C5, anti-ENG, anti-CC1Q, anti-TNFα, anti-RGMa, anti-TTR, anti-CTGF, anti-IL6R, anti-IL6, anti-CD19, anti-ITGF7, anti-SOST, anti-pKal mAb, anti-IL/ILR, anti-ITGA4, anti-IgE, or anti-TSLP, operably linked to one or more regulatory sequences that control expression of the transgene in human muscle cells.

### 5.6.3 Full Length Expression of mAb in Retinal Cell Types

[1316] In a specific embodiments for expressing an intact or substantially intact mAb in retinal cell types, the constructs described herein comprise the following components: (1) AAV2 inverted terminal repeats that flank the expression cassette; (2) Control elements, which include a) the CB7 promoter, comprising the CMV enhancer/chicken β-actin promoter, b) a chicken β-actin intron and c) a rabbit β-globin poly A signal; and (3) nucleic acid sequences coding for the heavy chain Fab of an anti-VEGF (e.g., sevacizumab), anti-EpoR (e.g., LKA-651), anti-Aβ (e.g., solanezumab, lecanemab, and GSK933776) anti-ALK1 (e.g., ascrinvacumab), anti-C5 (e.g., tesidolumab, ravulizumab), anti-CD105 or anti-ENG (e.g., carotuximab), anti-CC1Q (e.g., ANX-007), anti-TNFα (e.g., adalimumab, infliximab, and golimumab), anti-IL6R (e.g., satralizumab, sarilumab, and tocilizumab), anti-IL6 (e.g. siltuximab, clazakizumab, sirukumab, olokizumab, and gerilimzumab), anti-CD19 (e.g., inebilizumab), an Fc polypeptide associated with the therapeutic antibody (Table 6) or of the same IgG isotype as the native form of the therapeutic antibody, such as an IgG isotype amino acid sequence from FIG. 23, and a light chain of an anti-VEGF (e.g., sevacizumab), anti-Aβ (e.g., solanezumab, lecanemab, and GSK933776), anti-EpoR (e.g., LKA-651), anti-ALK1 (e.g., ascrinvacumab), anti-C5 (e.g., tesidolumab and ravulizumab), anti-CD105 or anti-Endoglin (e.g., carotuximab), anti-CC1Q (e.g., ANX-007), anti-TNFα (e.g., adalimumab, infliximab, and golimumab), anti-IL6R (e.g., satralizumab, sarilumab, and tocilizumab), anti-CD19 (e.g., inebilizumab), and anti-IL6 (e.g. siltuximab, clazakizumab, sirukumab, olokizumab, and gerilimzumab), wherein the heavy chain (Fab and Fc polypeptide) and light chain are separated by a self-cleaving furin (F)/F2A or flexible linker, ensuring expression of equal amounts of the heavy and the light chain polypeptides. An exemplary construct is provided in FIG. 1.

[1317] In specific embodiments, provided are AAV vectors comprising a viral capsid that is at least 95% identical to the amino acid sequence of an AAV8 capsid (SEQ ID NO: 143) or of an AAV2.7m8 (SEQ ID NO: 142); and an artificial genome comprising an expression cassette flanked by AAV inverted terminal repeats (ITRs), wherein the expression cassette comprises a transgene encoding an intact or substantially intact anti-VEGF, anti-fD, anti-MMP9, anti-EpoR, anti-Aβ, anti-ALK-1, anti-C5, anti-ENG, anti-CC1Q, anti-TNFα, anti-IL6R, anti-IL6, or anti-CD19 mAb, operably linked to one or more regulatory sequences that control expression of the transgene in one or more retina cell types (such as human photoreceptor cells (cone cells, rod cells); horizontal cells; bipolar cells; amarcrine cells; retina ganglion cells (midget cell, parasol cell, bistratified cell, giant retina ganglion cell, photosensitive ganglion cell, and muller glia); and retinal pigment epithelial cells).

### 6. EXAMPLES

### 6.1 Example 1: Solanezumab Fab cDNA-Based Vector

[1318] A solanezumab Fab cDNA-based vector is constructed comprising a transgene comprising nucleotide sequences encoding the Fab portion of the heavy and light chain sequences of solanezumab (amino acid sequences being SEQ ID NOs. 1 and 2, respectively). The nucleotide sequence coding for the Fab portion of the heavy and light chain is codon optimized for expression in human CNS cells. Nucleotide sequences may be the nucleotide sequence of SEQ ID NOs. 71 and 72, respectively. The transgene also comprises nucleotide sequences that encodes a signal peptide, e.g., MYRMQLLLLIALSLALVTNS (SEQ ID NO: 146). The nucleotide sequences encoding the light chain ad heavy chain are separated by IRES elements or 2A cleavage sites (SEQ ID NOs: 227-230) to create a bicistronic vector. See FIG. 2A for amino acid sequence of a transgene product. The vector additionally includes a constitutive promoter, such as CB7 or an inducible promoter, such as a hypoxia-inducible promoter.

### 6.2 Example 2: GSK933776 Fab cDNA-Based Vector

[1319] A GSK933776 Fab cDNA-based vector is constructed comprising a transgene comprising nucleotide sequences encoding the Fab portion of the heavy and light chain sequences of GSK933776 (amino acid sequences being SEQ ID NOs. 3 and 4, respectively). The nucleotide sequence coding for the Fab portion of the heavy and light chain is codon optimized for expression in human CNS cells. Nucleotide sequences may be the nucleotide sequence of SEQ ID NOs. 73 and 74, respectively. The transgene also comprises nucleotide sequences that encodes a signal peptide, e.g., MYRMQLLLLIALSLALVTNS (SEQ ID NO: 146). The nucleotide sequences encoding the light chain and heavy chain are separated by IRES elements or 2A cleavage sites (SEQ ID NOs: 227-230) to create a bicistronic vector. See FIG. 2B for amino acid sequence of a transgene product. The vector additionally includes a constitutive promoter, such as CB7 or an inducible promoter, such as a hypoxia-inducible promoter.

### 6.3 Example 3: AL-001 Fab cDNA-Based Vector

[1320] An AL-001 Fab cDNA-based vector is constructed comprising a transgene comprising nucleotide sequences encoding the Fab portion of the heavy and light chain sequences of AL-001 (amino acid sequences being SEQ ID NOs. 5 and 6, respectively). The nucleotide sequence coding for the Fab portion of the heavy and light chain is codon optimized for expression in human CNS cells and may be the nucleotide sequence of SEQ ID NOs. 75 and 76, respectively. The transgene also comprises nucleotide sequences that encodes a signal peptide, e.g., MYRMQLLLLIALSLALVTNS (SEQ ID NO: 146). The nucleotide sequences encoding the light chain and heavy chain are separated by IRES elements or 2A cleavage sites (SEQ ID NOs: 227-230) to create a bicistronic vector. See FIG. 3 for amino acid sequence of a transgene product. The vector additionally includes a constitutive promoter, such as CB7 or an inducible promoter, such as a hypoxia-inducible promoter.

### 6.4 Example 4: ABBV-8E12 Fab cDNA-Based Vector

[1321] An ABBV-8E12 Fab cDNA-based vector is constructed comprising a transgene comprising nucleotide sequences encoding the Fab portion of the heavy and light chain sequences of ABBV-8E12 (amino acid sequences being SEQ ID NOs. 7 and 8, respectively). The nucleotide sequence coding for the Fab portion of the heavy and light chain is codon optimized for expression in human CNS cells and may be the nucleotide sequence of SEQ ID NOs: 77 and 78, respectively. The transgene also comprises nucleotide sequences that encodes a signal peptide, e.g., MYRMQLLLLIALSLALVTNS (SEQ ID NO: 146). The nucleotide sequences encoding the light chain and heavy chain are separated by IRES elements or 2A cleavage sites (SEQ ID NOs: 227-230) to create a bicistronic vector. See FIG. 4A for amino acid sequence of a transgene product. The vector additionally includes a constitutive promoter, such as CB7 or an inducible promoter, such as a hypoxia-inducible promoter.

### 6.5 Example 5: UCB-0107 Fab cDNA-Based Vector

[1322] An UCB-0107 Fab cDNA-based vector is constructed comprising a transgene comprising nucleotide sequences encoding the Fab portion of the heavy and light chain sequences of UCB-0107 (amino acid sequences being SEQ ID NOs. 9 and 10, respectively). The nucleotide sequence coding for the Fab portion of the heavy and light chain is codon optimized for expression in human CNS cells and may be the nucleotide sequence of SEQ ID NOs. 79 and 80, respectively. The transgene also comprises nucleotide sequences that encodes a signal peptide, e.g., MYRMQLLLLIALSLALVTNS (SEQ ID NO: 146). The nucleotide sequences encoding the light chain and heavy chain are separated by IRES elements or 2A cleavage sites (SEQ ID NOs: 227-230) to create a bicistronic vector. See FIG. 4B for amino acid sequence of a transgene product. The vector additionally includes a constitutive promoter, such as CB7 or an inducible promoter, such as a hypoxia-inducible promoter.

### 6.6 Example 6: NI-105 Fab cDNA-Based Vector

[1323] A NI-105 Fab cDNA-based vector is constructed comprising a transgene comprising nucleotide sequences encoding the Fab portion of the heavy and light chain sequences of NI-105 (amino acid sequences being SEQ ID NOs. 11 and 12, respectively). The nucleotide sequence coding for the Fab portion of the heavy and light chain is codon optimized for expression in human CNS cells and may be the nucleotide sequence of SEQ ID NOs. 81 and 82, respectively. The transgene also comprises nucleotide sequences that encodes a signal peptide, e.g., MYRMQLLLLIALSLALVTNS (SEQ ID NO: 146). The nucleotide sequences encoding the light chain and heavy chain are separated by IRES elements or 2A cleavage sites (SEQ ID NOs: 227-230) to create a bicistronic vector. See FIG. 4C for amino acid sequence of a transgene product. The vector additionally includes a constitutive promoter, such as CB7 or an inducible promoter, such as a hypoxia-inducible promoter.

### 6.7 Example 7: VX15/2503 Fab cDNA-Based Vector

[1324] A VX15/2503 Fab cDNA-based vector is constructed comprising a transgene comprising nucleotide sequences encoding the Fab portion of the heavy and light chain sequences of VX15/2503 (amino acid sequences being SEQ ID NOs. 13 and 14, respectively). The nucleotide sequence coding for the Fab portion of the heavy and light chain is codon optimized for expression in human CNS cells and may be the nucleotide sequence of SEQ ID NOs: 83 and 84, respectively. The transgene also comprises nucleotide sequences that encodes a signal peptide, e.g., MYRMQLLLLIALSLALVTNS (SEQ ID NO: 146). The nucleotide sequences encoding the light chain and heavy chain are separated by IRES elements or 2A cleavage sites (SEQ ID NOs: 227-230) to create a bicistronic vector. See FIG. 5 for amino acid sequence of a transgene product. The vector additionally includes a constitutive promoter, such as CB7 or an inducible promoter, such as a hypoxia-inducible promoter.

### 6.8 Example 8: Prasinezumab Fab cDNA-Based Vector

[1325] A prasinezumab Fab cDNA-based vector is constructed comprising a transgene comprising nucleotide sequences encoding the Fab portion of the heavy and light chain sequences of prasinezumab (amino acid sequences being SEQ ID NOs. 15 and 16, respectively). The nucleotide sequence coding for the Fab portion of the heavy and light chain is codon optimized for expression in human CNS cells and may be the nucleotide sequence of SEQ ID NOs. 85 and 86, respectively. The transgene also comprises nucleotide sequences that encodes a signal peptide, e.g., MYRMQLLLLIALSLALVTNS (SEQ ID NO: 146). The nucleotide sequences encoding the light chain and heavy chain are separated by IRES elements or 2A cleavage sites (SEQ ID NOs: 227-230) to create a bicistronic vector. See FIG. 6A for amino acid sequence of a transgene product. The vector additionally includes a constitutive promoter, such as CB7 or an inducible promoter, such as a hypoxia-inducible promoter.

### 6.9 Example 9: NI-202 Fab cDNA-Based Vector

[1326] A NI-202 Fab cDNA-based vector is constructed comprising a transgene comprising nucleotide sequences encoding the Fab portion of the heavy and light chain sequences of NI-202 (amino acid sequences being SEQ ID NOs. 17 and 18, respectively). The nucleotide sequence coding for the Fab portion of the heavy and light chain is codon optimized for expression in human CNS cells and may be the nucleotide sequence of SEQ ID NOS: 87 and 88, respectively. The transgene also comprises nucleotide sequences that encodes a signal peptide, e.g., MYRMQLLLLIALSLALVTNS (SEQ ID NO: 146). The nucleotide sequences encoding the light chain and heavy chain are separated by IRES elements or 2A cleavage sites (SEQ ID NOs: 227-230) to create a bicistronic vector. See FIG. 6B for amino acid sequence of a transgene product. The vector additionally includes a constitutive promoter, such as CB7 or an inducible promoter, such as a hypoxia-inducible promoter.

### 6.10 Example 10: MEDI-1341/TAK 341 Fab cDNA-Based Vector

[1327] A MEDI-1341/TAK 341 Fab cDNA-based vector is constructed comprising a transgene comprising nucleotide sequences encoding the Fab portion of the heavy and light chain sequences of MEDI-1341/TAK 341 (amino acid sequences being SEQ ID NOs. 19 and 20, respectively). The nucleotide sequence coding for the Fab portion of the heavy and light chain is codon optimized for expression in human CNS cells and may be the nucleotide sequence of SEQ ID NOS: 89 and 90, respectively. The transgene also comprises nucleotide sequences that encodes a signal peptide, e.g., MYRMQLLLLIALSLALVTNS (SEQ ID NO: 146). The nucleotide sequences encoding the light chain and heavy chain are separated by IRES elements or 2A cleavage sites (SEQ ID Nos: 227-230) to create a bicistronic vector. See FIG. 6C for amino acid sequence of a transgene product. The vector additionally includes a constitutive promoter, such as CB7 or an inducible promoter, such as a hypoxia-inducible promoter.

### 6.11 Example 11: NI-204.10D12 Fab cDNA-Based Vector

[1328] A NI-204.10D12 Fab cDNA-based vector is constructed comprising a transgene comprising nucleotide sequences encoding the Fab portion of the heavy and light chain sequences of NI-204.10D12 (amino acid sequences being SEQ ID NOs. 21 and 22, respectively). The nucleotide sequence coding for the Fab portion of the heavy and light chain is codon optimized for expression in human CNS cells and may be the nucleotide sequence of SEQ ID NOs: 91 and 92, respectively. The transgene also comprises nucleotide sequences that encodes a signal peptide, e.g., MYRMQLLLLIALSLALVTNS (SEQ ID NO: 146). The nucleotide sequences encoding the light chain and heavy chain are separated by IRES elements or 2A cleavage sites (SEQ ID NOs: 227-230) to create a bicistronic vector. See FIG. 7A for amino acid sequence of a transgene product. The vector additionally includes a constitutive promoter, such as CB7 or an inducible promoter, such as a hypoxia-inducible promoter.

### 6.12 Example 12: NI-204.12G7 Fab cDNA-Based Vector

[1329] A NI-204.12G7 Fab cDNA-based vector is constructed comprising a transgene comprising nucleotide sequences encoding the Fab portion of the heavy and light chain sequences of NI-204.12G7 (amino acid sequences being SEQ ID NOs. 23 and 24, respectively). The nucleotide sequence coding for the Fab portion of the heavy and light chain is codon optimized for expression in human CNS cells and may be the nucleotide sequence of SEQ ID NOs: 93 and 94, respectively. The transgene also comprises nucleotide sequences that encodes a signal peptide, e.g., MYRMQLLLLIALSLALVTNS (SEQ ID NO: 146). The nucleotide sequences encoding the light chain and heavy chain are separated by IRES elements or 2A cleavage sites (SEQ ID NOs: 227-230) to create a bicistronic vector. See FIG. 7B for amino acid sequence of a transgene product. The vector additionally includes a constitutive promoter, such as CB7 or an inducible promoter, such as a hypoxia-inducible promoter.

### 6.13 Example 13: Eptinezumab Fab cDNA-Based Vector

[1330] An eptinezumab Fab cDNA-based vector is constructed comprising a transgene comprising nucleotide sequences encoding the Fab portion of the heavy and light chain sequences of eptinezumab (amino acid sequences being SEQ ID NOs. 25 and 26, respectively). The nucleotide sequence coding for the Fab portion of the heavy and light chain is codon optimized for expression in human CNS cells and may be the nucleotide sequence of SEQ ID NOs: 95 and 96, respectively. The transgene also comprises nucleotide sequences that encodes a signal peptide, e.g., MYRMQLLLLIALSLALVTNS (SEQ ID NO: 146). The nucleotide sequences encoding the light chain and heavy chain are separated by IRES elements or 2A cleavage sites (SEQ ID NOs: 227-230) to create a bicistronic vector. See FIG. 8A for amino acid sequence of a transgene product. The vector additionally includes a constitutive promoter, such as CB7 or an inducible promoter, such as a hypoxia-inducible promoter.

### 6.14 Example 14: Fremanezumab Fab cDNA-Based Vector

[1331] A fremanezumab Fab cDNA-based vector is constructed comprising a transgene comprising nucleotide sequences encoding the Fab portion of the heavy and light chain sequences of fremanezumab (amino acid sequences being SEQ ID NOs. 27 and 28, respectively). The nucleotide sequence coding for the Fab portion of the heavy and light chain is codon optimized for expression in human CNS cells and may be the nucleotide sequence of SEQ ID NOS: 97 and 98, respectively. The transgene also comprises nucleotide sequences that encodes a signal peptide, e.g., MYRMQLLLLIALSLALVTNS (SEQ ID NO: 146). The nucleotide sequences encoding the light chain and heavy chain are separated by IRES elements or 2A cleavage sites (SEQ ID NOs: 227-230) to create a bicistronic vector. See FIG. 8B for amino acid sequence of a transgene product. The vector additionally includes a constitutive promoter, such as CB7 or an inducible promoter, such as a hypoxia-inducible promoter.

### 6.15 Example 15: Galcanezumab Fab cDNA-Based Vector

[1332] A galcanezumab Fab cDNA-based vector is constructed comprising a transgene comprising nucleotide sequences encoding the Fab portion of the heavy and light chain sequences of galcanezumab (amino acid sequences being SEQ ID NOs. 29 and 30, respectively). The nucleotide sequence coding for the Fab portion of the heavy and light chain is codon optimized for expression in human CNS cells and may be the nucleotide sequence of SEQ ID NOs. 99 and 100, respectively. The transgene also comprises nucleotide sequences that encodes a signal peptide, e.g., MYRMQLLLLIALSLALVTNS (SEQ ID NO: 146). The nucleotide sequences encoding the light chain and heavy chain are separated by IRES elements or 2A cleavage sites (SEQ ID NOs: 227-230) to create a bicistronic vector. See FIG. 8C for amino acid sequence of a transgene product. The vector additionally includes a constitutive promoter, such as CB7 or an inducible promoter, such as a hypoxia-inducible promoter.

### 6.16 Example 16: Sevacizumab Fab cDNA-Based Vector

[1333] A sevacizumab Fab cDNA-based vector is constructed comprising a transgene comprising nucleotide sequences encoding the Fab portion of the heavy and light chain sequences of sevacizumab (amino acid sequences being SEQ ID NOs. 31 and 32, respectively). The nucleotide sequence coding for the Fab portion of the heavy and light chain is codon optimized for expression in human CNS cells and may be the nucleotide sequence of SEQ ID NOs. 101 and 102, respectively. The transgene also comprises nucleotide sequences that encodes a signal peptide, e.g., MYRMQLLLLIALSLALVTNS (SEQ ID NO: 146). The nucleotide sequences encoding the light chain and heavy chain are separated by IRES elements or 2A cleavage sites (SEQ ID NOs: 227-230) to create a bicistronic vector. See FIG. 9A for amino acid sequence of a transgene product. The vector additionally includes a constitutive promoter, such as CB7 or an inducible promoter, such as a hypoxia-inducible promoter.

### 6.17 Example 17: LKA-651 (NVS2) Fab cDNA-Based Vector

[1334] A LKA-651 (NVS2) Fab cDNA-based vector is constructed comprising a transgene comprising nucleotide sequences encoding the Fab portion of the heavy and light chain sequences of LKA-651 (NVS2) (amino acid sequences being SEQ ID NOs. 33 and 34, respectively). The nucleotide sequence coding for the Fab portion of the heavy and light chain is codon optimized for expression in human CNS cells and may be the nucleotide sequence of SEQ ID NOs. 103 and 104, respectively. The transgene also comprises nucleotide sequences that encodes a signal peptide, e.g., MYRMQLLLLIALSLALVTNS (SEQ ID NO: 146). The nucleotide sequences encoding the light chain and heavy chain are separated by IRES elements or 2A cleavage sites (SEQ ID NOs: 227-230) to create a bicistronic vector. See FIG. 9B for amino acid sequence of a transgene product. The vector additionally includes a constitutive promoter, such as CB7 or an inducible promoter, such as a hypoxia-inducible promoter.

### 6.18 Example 18: LKA-651 (NVS3) Fab cDNA-Based Vector

[1335] A LKA-651 (NVS3) Fab cDNA-based vector is constructed comprising a transgene comprising nucleotide sequences encoding the Fab portion of the heavy and light chain sequences of LKA-651 (NVS3) (amino acid sequences being SEQ ID NOs. 35 and 36, respectively). The nucleotide sequence coding for the Fab portion of the heavy and light chain is codon optimized for expression in human CNS cells and may be the nucleotide sequence of SEQ ID NOs. 105 and 106, respectively. The transgene also comprises nucleotide sequences that encodes a signal peptide, e.g., MYRMQLLLLIALSLALVTNS (SEQ ID NO: 146). The nucleotide sequences encoding the light chain and heavy chain are separated by IRES elements or 2A cleavage sites (SEQ ID NOs: 227-230) to create a bicistronic vector. See FIG. 9C for amino acid sequence of a transgene product. The vector additionally includes a constitutive promoter, such as CB7 or an inducible promoter, such as a hypoxia-inducible promoter.

### 6.19 Example 19: Ascrinvacumab Fab cDNA-Based Vector

[1336] An ascrinvacumab Fab cDNA-based vector is constructed comprising a transgene comprising nucleotide sequences encoding the Fab portion of the heavy and light chain sequences of ascrinvacumab (amino acid sequences being SEQ ID NOs. 37 and 38, respectively). The nucleotide sequence coding for the Fab portion of the heavy and light chain is codon optimized for expression in human CNS cells and may be the nucleotide sequence of SEQ ID NOs. 107 and 108, respectively. The transgene also comprises nucleotide sequences that encodes a signal peptide, e.g., MYRMQLLLLIALSLALVTNS (SEQ ID NO: 146). The nucleotide sequences encoding the light chain and heavy chain are separated by IRES elements or 2A cleavage sites (SEQ ID NOs: 227-230) to create a bicistronic vector. See FIG. 10A for amino acid sequence of a transgene product. The vector additionally includes a constitutive promoter, such as CB7 or an inducible promoter, such as a hypoxia-inducible promoter.

### 6.20 Example 20: Tesidolumab Fab cDNA-Based Vector

[1337] A tesidolumab Fab cDNA-based vector is constructed comprising a transgene comprising nucleotide sequences encoding the Fab portion of the heavy and light chain sequences of tesidolumab (amino acid sequences being SEQ ID NOs. 39 and 40, respectively). The nucleotide sequence coding for the Fab portion of the heavy and light chain is codon optimized for expression in human CNS cells and may be the nucleotide sequence of SEQ ID NOs. 109 and 110, respectively. The transgene also comprises nucleotide sequences that encodes a signal peptide, e.g., MYRMQLLLLIALSLALVTNS (SEQ ID NO: 146). The nucleotide sequences encoding the light chain and heavy chain are separated by IRES elements or 2A cleavage sites (SEQ ID NOs: 227-230) to create a bicistronic vector. See FIG. 10B for amino acid sequence of a transgene product. The vector additionally includes a constitutive promoter, such as CB7 or an inducible promoter, such as a hypoxia-inducible promoter.

### 6.21 Example 21: Carotuximab Fab cDNA-Based Vector

[1338] A carotuximab Fab cDNA-based vector is constructed comprising a transgene comprising nucleotide sequences encoding the Fab portion of the heavy and light chain sequences of carotuximab (amino acid sequences being SEQ ID NOs. 41 and 42, respectively). The nucleotide sequence coding for the Fab portion of the heavy and light chain is codon optimized for expression in human CNS cells and may be the nucleotide sequence of SEQ ID NOS: 111 and 112, respectively. The transgene also comprises nucleotide sequences that encodes a signal peptide, e.g., MYRMQLLLLIALSLALVTNS (SEQ ID NO: 146). The nucleotide sequences encoding the light chain and heavy chain are separated by IRES elements or 2A cleavage sites (SEQ ID NOs: 227-230) to create a bicistronic vector. See FIG. 10C for amino acid sequence of a transgene product. The vector additionally includes a constitutive promoter, such as CB7 or an inducible promoter, such as a hypoxia-inducible promoter.

### 6.22 Example 22: ANX-007 Fab cDNA-Based Vector

[1339] An ANX-007 Fab cDNA-based vector is constructed comprising a transgene comprising nucleotide sequences encoding the Fab portion of the heavy and light chain sequences of ANX-007 (amino acid sequences being SEQ ID NOs. 43 and 44, respectively). The nucleotide sequence coding for the Fab portion of the heavy and light chain is codon optimized for expression in human CNS cells and may be the nucleotide sequence of SEQ ID NOs. 113 and 114, respectively. The transgene also comprises nucleotide sequences that encodes a signal peptide, e.g., MYRMQLLLLIALSLALVTNS (SEQ ID NO: 146). The nucleotide sequences encoding the light chain and heavy chain are separated by IRES elements or 2A cleavage sites (SEQ ID NOs: 227-230) to create a bicistronic vector. See FIG. 11 for amino acid sequence of a transgene product. The vector additionally includes a constitutive promoter, such as CB7 or an inducible promoter, such as a hypoxia-inducible promoter.

### 6.23 Example 23: Adalimumab Fab cDNA-Based Vector

[1340] An adalimumab Fab cDNA-based vector is constructed comprising a transgene comprising nucleotide sequences encoding the Fab portion of the heavy and light chain sequences of adalimumab (amino acid sequences being SEQ ID NOs. 45 and 46, respectively). The nucleotide sequence coding for the Fab portion of the heavy and light chain is codon optimized for expression in human CNS cells and may be the nucleotide sequence of SEQ ID NOs. 115 and 116, respectively. The transgene also comprises nucleotide sequences that encodes a signal peptide, e.g., MYRMQLLLLIALSLALVTNS (SEQ ID NO: 146). The nucleotide sequences encoding the light chain and heavy chain are separated by IRES elements or 2A cleavage sites (SEQ ID NOs: 227-230) to create a bicistronic vector. See FIG. 12A for amino acid sequence of a transgene product. The vector additionally includes a constitutive promoter, such as CB7 or an inducible promoter, such as a hypoxia-inducible promoter.

### 6.24 Example 24: Infliximab Fab cDNA-Based Vector

[1341] An infliximab Fab cDNA-based vector is constructed comprising a transgene comprising nucleotide sequences encoding the Fab portion of the heavy and light chain sequences of infliximab (amino acid sequences being SEQ ID NOs. 47 and 48, respectively). The nucleotide sequence coding for the Fab portion of the heavy and light chain is codon optimized for expression in human CNS cells and may be the nucleotide sequence of SEQ ID NOs. 117 and 118, respectively. The transgene also comprises nucleotide sequences that encodes a signal peptide, e.g., MYRMQLLLLIALSLALVTNS (SEQ ID NO: 146). The nucleotide sequences encoding the light chain and heavy chain are separated by IRES elements or 2A cleavage sites (SEQ ID NOs: 227-230) to create a bicistronic vector. See FIG. 12B for amino acid sequence of a transgene product. The vector additionally includes a constitutive promoter, such as CB7 or an inducible promoter, such as a hypoxia-inducible promoter.

### 6.25 Example 25: Golimumab Fab cDNA-Based Vector

[1342] A golimumab Fab cDNA-based vector is constructed comprising a transgene comprising nucleotide sequences encoding the Fab portion of the heavy and light chain sequences of golimumab (amino acid sequences being SEQ ID NOs. 49 and 50, respectively). The nucleotide sequence coding for the Fab portion of the heavy and light chain is codon optimized for expression in human CNS cells and may be the nucleotide sequence of SEQ ID NOs. 119 and 120, respectively. The transgene also comprises nucleotide sequences that encodes a signal peptide, e.g., MYRMQLLLLIALSLALVTNS (SEQ ID NO: 146). The nucleotide sequences encoding the light chain and heavy chain are separated by IRES elements or 2A cleavage sites (SEQ ID NOs: 227-230) to create a bicistronic vector. See FIG. 12C for amino acid sequence of a transgene product. The vector additionally includes a constitutive promoter, such as CB7 or an inducible promoter, such as a hypoxia-inducible promoter.

### 6.26 Example 26: Elezanumab Fab cDNA-Based Vector

[1343] An elezanumab Fab cDNA-based vector is constructed comprising a transgene comprising nucleotide sequences encoding the Fab portion of the heavy and light chain sequences of elezanumab (amino acid sequences being SEQ ID NOs. 51 and 52, respectively). The nucleotide sequence coding for the Fab portion of the heavy and light chain is codon optimized for expression in human CNS cells and may be the nucleotide sequence of SEQ ID NOS: 121 and 122, respectively. The transgene also comprises nucleotide sequences that encodes a signal peptide, e.g., MYRMQLLLLIALSLALVTNS (SEQ ID NO: 146). The nucleotide sequences encoding the light chain and heavy chain are separated by IRES elements or 2A cleavage sites (SEQ ID NOs: 227-230) to create a bicistronic vector. See FIG. 13 for amino acid sequence of a transgene product. The vector additionally includes a constitutive promoter, such as CB7 or an inducible promoter, such as a hypoxia-inducible promoter.

### 6.27 Example 27: NI-301 Fab cDNA-Based Vector

[1344] An NI-301 Fab cDNA-based vector is constructed comprising a transgene comprising nucleotide sequences encoding the Fab portion of the heavy and light chain sequences of NI-301 (amino acid sequences being SEQ ID NOs. 53 and 54, respectively). The nucleotide sequence coding for the Fab portion of the heavy and light chain is codon optimized for expression in human CNS cells and may be the nucleotide sequence of SEQ ID NOs. 123 and 124, respectively. The transgene also comprises nucleotide sequences that encodes a signal peptide, e.g., MYRMQLLLLIALSLALVTNS (SEQ ID NO: 146). The nucleotide sequences encoding the light chain and heavy chain are separated by IRES elements or 2A cleavage sites (SEQ ID NOs: 227-230) to create a bicistronic vector. See FIG. 14A for amino acid sequence of a transgene product. The vector additionally includes a constitutive promoter, such as CB7 or an inducible promoter, such as a hypoxia-inducible promoter.

### 6.28 Example 28: PRX-004 Fab cDNA-Based Vector

[1345] A PRX-004 Fab cDNA-based vector is constructed comprising a transgene comprising nucleotide sequences encoding the Fab portion of the heavy and light chain sequences of PRX-004 (amino acid sequences being SEQ ID NOs. 55 and 56, respectively). The nucleotide sequence coding for the Fab portion of the heavy and light chain is codon optimized for expression in human CNS cells and may be the nucleotide sequence of SEQ ID NOs. 125 and 126, respectively. The transgene also comprises nucleotide sequences that encodes a signal peptide, e.g., MYRMQLLLLIALSLALVTNS (SEQ ID NO: 146). The nucleotide sequences encoding the light chain and heavy chain are separated by IRES elements or 2A cleavage sites (SEQ ID NOs: 227-230) to create a bicistronic vector. See FIG. 14B for amino acid sequence of a transgene product. The vector additionally includes a constitutive promoter, such as CB7 or an inducible promoter, such as a hypoxia-inducible promoter.

### 6.29 Example 29: Pamrevlumab Fab cDNA-Based Vector

[1346] A pamrevlumab Fab cDNA-based vector is constructed comprising a transgene comprising nucleotide sequences encoding the Fab portion of the heavy and light chain sequences of pamrevlumab (amino acid sequences being SEQ ID NOs. 57 and 58, respectively). The nucleotide sequence coding for the Fab portion of the heavy and light chain is codon optimized for expression in human CNS cells and may be the nucleotide sequence of SEQ ID NOs. 127 and 128, respectively. The transgene also comprises nucleotide sequences that encodes a signal peptide, e.g., MYRMQLLLLIALSLALVTNS (SEQ ID NO: 146). The nucleotide sequences encoding the light chain and heavy chain are separated by IRES elements or 2A cleavage sites (SEQ ID NOs: 227-230) to create a bicistronic vector. See FIG. 15 for amino acid sequence of a transgene product. The vector additionally includes a constitutive promoter, such as CB7 or an inducible promoter, such as a hypoxia-inducible promoter.

### 6.30 Example 30: Satralizumab Fab cDNA-Based Vector

[1347] A satralizumab Fab cDNA-based vector is constructed comprising a transgene comprising nucleotide sequences encoding the Fab portion of the heavy and light chain sequences of satralizumab (amino acid sequences being SEQ ID NOs. 59 and 60, respectively). The nucleotide sequence coding for the Fab portion of the heavy and light chain is codon optimized for expression in human CNS cells and may be the nucleotide sequence of SEQ ID NOs. 129 and 130, respectively. The transgene also comprises nucleotide sequences that encodes a signal peptide, e.g., MYRMQLLLLIALSLALVTNS (SEQ ID NO: 146). The nucleotide sequences encoding the light chain and heavy chain are separated by IRES elements or 2A cleavage sites (SEQ ID NOs: 227-230) to create a bicistronic vector. See FIG. 16A for amino acid sequence of a transgene product. The vector additionally includes a constitutive promoter, such as CB7 or an inducible promoter, such as a hypoxia-inducible promoter.

### 6.31 Example 31: Sarilumab Fab cDNA-Based Vector

[1348] A sarilumab Fab cDNA-based vector is constructed comprising a transgene comprising nucleotide sequences encoding the Fab portion of the heavy and light chain sequences of sarilumab (amino acid sequences being SEQ ID NOs. 61 and 62, respectively). The nucleotide sequence coding for the Fab portion of the heavy and light chain is codon optimized for expression in human CNS cells and may be the nucleotide sequence of SEQ ID NOs. 131 and 132, respectively. The transgene also comprises nucleotide sequences that encodes a signal peptide, e.g., MYRMQLLLLIALSLALVTNS (SEQ ID NO: 146). The nucleotide sequences encoding the light chain and heavy chain are separated by IRES elements or 2A cleavage sites (SEQ ID NOs: 227-230) to create a bicistronic vector. See FIG. 16B for amino acid sequence of a transgene product. The vector additionally includes a constitutive promoter, such as CB7 or an inducible promoter, such as a hypoxia-inducible promoter.

### 6.32 Example 32: Inebilizumab Fab cDNA-Based Vector

[1349] An inebilizumab Fab cDNA-based vector is constructed comprising a transgene comprising nucleotide sequences encoding the Fab portion of the heavy and light chain sequences of inebilizumab (amino acid sequences being SEQ ID NOs. 63 and 64, respectively). The nucleotide sequence coding for the Fab portion of the heavy and light chain is codon optimized for expression in human CNS cells and may be the nucleotide sequence of SEQ ID NOs. 133 and 134, respectively. The transgene also comprises nucleotide sequences that encodes a signal peptide, e.g., MYRMQLLLLIALSLALVTNS (SEQ ID NO: 146). The nucleotide sequences encoding the light chain and heavy chain are separated by IRES elements or 2A cleavage sites (SEQ ID NOs: 227-230) to create a bicistronic vector. See FIG. 16C for amino acid sequence of a transgene product. The vector additionally includes a constitutive promoter, such as CB7 or an inducible promoter, such as a hypoxia-inducible promoter.

### 6.33 Example 33: Etrolizumab Fab cDNA-Based Vector

[1350] An etrolizumab Fab cDNA-based vector is constructed comprising a transgene comprising nucleotide sequences encoding the Fab portion of the heavy and light chain sequences of etrolizumab (amino acid sequences being SEQ ID NOs. 65 and 66, respectively). The nucleotide sequence coding for the Fab portion of the heavy and light chain is codon optimized for expression in human CNS cells and may be the nucleotide sequence of SEQ ID NOS: 135 and 136, respectively. The transgene also comprises nucleotide sequences that encodes a signal peptide, e.g., MYRMQLLLLIALSLALVTNS (SEQ ID NO: 146). The nucleotide sequences encoding the light chain and heavy chain are separated by IRES elements or 2A cleavage sites (SEQ ID NOs: 227-230) to create a bicistronic vector. See FIG. 17 for amino acid sequence of a transgene product. The vector additionally includes a constitutive promoter, such as CB7 or an inducible promoter, such as a hypoxia-inducible promoter.

### 6.34 Example 34: Romosozumab Fab cDNA-Based Vector

[1351] A romosozumab Fab cDNA-based vector is constructed comprising a transgene comprising nucleotide sequences encoding the Fab portion of the heavy and light chain sequences of romosozumab (amino acid sequences being SEQ ID NOs. 67 and 68, respectively). The nucleotide sequence coding for the Fab portion of the heavy and light chain may be the nucleotide sequence of SEQ ID NOS: 137 and 138, respectively. The transgene also comprises nucleotide sequences that encodes a signal peptide, e.g., MYRMQLLLLIALSLALVTNS (SEQ ID NO: 146). The nucleotide sequences encoding the light chain and heavy chain are separated by IRES elements or 2A cleavage sites (SEQ ID NOs: 227-230) to create a bicistronic vector. See FIG. 18 for amino acid sequence of a transgene product. The vector additionally includes a constitutive promoter, such as CB7 or an inducible promoter, such as a hypoxia-inducible promoter.

### 6.35 Example 35: Siltuximab Fab cDNA-Based Vector

[1352] A siltuximab Fab cDNA-based vector is constructed comprising a transgene comprising nucleotide sequences encoding the Fab portion of the heavy and light chain sequences of siltuximab (amino acid sequences being SEQ ID NOs. 331 and 332, respectively). The nucleotide sequence coding for the Fab portion of the heavy and light and may be the nucleotide sequence of SEQ ID NOs: 343 and 344, respectively. The transgene also comprises nucleotide sequences that encodes a signal peptide, e.g., MYRMQLLLLIALSLALVTNS (SEQ ID NO: 146). The nucleotide sequences encoding the light chain and heavy chain are separated by IRES elements or 2A cleavage sites (SEQ ID NOs: 227-230) to create a bicistronic vector. See FIG. 16C for amino acid sequence of a transgene product. The vector additionally includes a constitutive promoter, such as CB7 or an inducible promoter, such as a hypoxia-inducible promoter.

### 6.36 Example 36: Clazakizumab Fab cDNA-Based Vector

[1353] A clazakizumab Fab cDNA-based vector is constructed comprising a transgene comprising nucleotide sequences encoding the Fab portion of the heavy and light chain sequences of clazakizumab (amino acid sequences being SEQ ID NOs. 333 and 334, respectively). The nucleotide sequence coding for the Fab portion of the heavy and light chain may be the nucleotide sequence of SEQ ID NOs: 345 and 346, respectively. The transgene also comprises nucleotide sequences that encodes a signal peptide, e.g., MYRMQLLLLIALSLALVTNS (SEQ ID NO: 146). The nucleotide sequences encoding the light chain and heavy chain are separated by IRES elements or 2A cleavage sites (SEQ ID NOs: 227-230) to create a bicistronic vector. See FIG. 16D for amino acid sequence of a transgene product. The vector additionally includes a constitutive promoter, such as CB7 or an inducible promoter, such as a hypoxia-inducible promoter.

### 6.37 Example 37: Sirukumab Fab cDNA-Based Vector

[1354] A sirukumab Fab cDNA-based vector is constructed comprising a transgene comprising nucleotide sequences encoding the Fab portion of the heavy and light chain sequences of sirukumab (amino acid sequences being SEQ ID NOs. 335 and 336, respectively). The nucleotide sequence coding for the Fab portion of the heavy and light chain may be the nucleotide sequence of SEQ ID NOs: 347 and 348, respectively. The transgene also comprises nucleotide sequences that encodes a signal peptide, e.g., MYRMQLLLLIALSLALVTNS (SEQ ID NO: 146). The nucleotide sequences encoding the light chain and heavy chain are separated by IRES elements or 2A cleavage sites (SEQ ID NOs: 227-230) to create a bicistronic vector. See FIG. 16E for amino acid sequence of a transgene product. The vector additionally includes a constitutive promoter, such as CB7 or an inducible promoter, such as a hypoxia-inducible promoter.

### 6.38 Example 38: Olokizumab Fab cDNA-Based Vector

[1355] A olokizumab Fab cDNA-based vector is constructed comprising a transgene comprising nucleotide sequences encoding the Fab portion of the heavy and light chain sequences of olokizumab (amino acid sequences being SEQ ID NOs. 337 and 338, respectively). The nucleotide sequence coding for the Fab portion of the heavy and light chain may be the nucleotide sequence of SEQ ID NOs: 349 and 350, respectively. The transgene also comprises nucleotide sequences that encodes a signal peptide, e.g., MYRMQLLLLIALSLALVTNS (SEQ ID NO: 146). The nucleotide sequences encoding the light chain and heavy chain are separated by IRES elements or 2A cleavage sites (SEQ ID NOs: 227-230) to create a bicistronic vector. See FIG. 16F for amino acid sequence of a transgene product. The vector additionally includes a constitutive promoter, such as CB7 or an inducible promoter, such as a hypoxia-inducible promoter.

### 6.39 Example 39: Gerilimzumab Fab cDNA-Based Vector

[1356] A gerilimzumab Fab cDNA-based vector is constructed comprising a transgene comprising nucleotide sequences encoding the Fab portion of the heavy and light chain sequences of gerilimzumab (amino acid sequences being SEQ ID NOs. 339 and 340, respectively). The nucleotide sequence coding for the Fab portion of the heavy and light chain may be the nucleotide sequence of SEQ ID NOs: 351 and 352, respectively. The transgene also comprises nucleotide sequences that encodes a signal peptide, e.g., MYRMQLLLLIALSLALVTNS (SEQ ID NO: 146). The nucleotide sequences encoding the light chain and heavy chain are separated by IRES elements or 2A cleavage sites (SEQ ID NOs: 227-230) to create a bicistronic vector. See FIG. 16G for amino acid sequence of a transgene product. The vector additionally includes a constitutive promoter, such as CB7 or an inducible promoter, such as a hypoxia-inducible promoter.

### 6.40 Example 40: Tocilizumab Fab cDNA-Based Vector

[1357] A tocilizumab Fab cDNA-based vector is constructed comprising a transgene comprising nucleotide sequences encoding the Fab portion of the heavy and light chain sequences of tocilizumab (amino acid sequences being SEQ ID NOs. 341 and 342, respectively). The nucleotide sequence coding for the Fab portion of the heavy and light chain may be the nucleotide sequence of SEQ ID NOs: 353 and 354, respectively. The transgene also comprises nucleotide sequences that encodes a signal peptide, e.g., MYRMQLLLLIALSLALVTNS (SEQ ID NO: 146). The nucleotide sequences encoding the light chain and heavy chain are separated by IRES elements or 2A cleavage sites (SEQ ID NOs: 227-230) to create a bicistronic vector. See FIG. 16H for amino acid sequence of a transgene product. The vector additionally includes a constitutive promoter, such as CB7 or an inducible promoter, such as a hypoxia-inducible promoter.

### 6.41 Example 41: Lecanemab Fab cDNA-Based Vector

[1358] A lecanemab Fab cDNA-based vector is constructed comprising a transgene comprising nucleotide sequences encoding the Fab portion of the heavy and light chain sequences of lecanemab (amino acid sequences being SEQ ID NOs. 360 and 361, respectively). The nucleotide sequence coding for the Fab portion of the heavy and light chain may be the nucleotide sequence of SEQ ID NOs: 376 and 377, respectively. The transgene also comprises nucleotide sequences that encodes a signal peptide, e.g., MYRMQLLLLIALSLALVTNS (SEQ ID NO: 146). The nucleotide sequences encoding the light chain and heavy chain are separated by IRES elements or 2A cleavage sites (SEQ ID NOs: 227-230) to create a bicistronic vector. See FIG. 2C for amino acid sequence of a transgene product. The vector additionally includes a constitutive promoter, such as CB7 or an inducible promoter, such as a hypoxia-inducible promoter.

### 6.42 Example 42: Ravulizumab Fab cDNA-Based Vector

[1359] A ravulizumab Fab cDNA-based vector is constructed comprising a transgene comprising nucleotide sequences encoding the Fab portion of the heavy and light chain sequences of ravulizumab (amino acid sequences being SEQ ID NOs. 362 and 363, respectively). The nucleotide sequence coding for the Fab portion of the heavy and light chain may be the nucleotide sequence of SEQ ID NOs: 378 and 379, respectively. The transgene also comprises nucleotide sequences that encodes a signal peptide, e.g., MYRMQLLLLIALSLALVTNS (SEQ ID NO: 146). The nucleotide sequences encoding the light chain and heavy chain are separated by IRES elements or 2A cleavage sites (SEQ ID NOs: 227-230) to create a bicistronic vector. See FIG. 10D for amino acid sequence of a transgene product. The vector additionally includes a constitutive promoter, such as CB7 or an inducible promoter, such as a hypoxia-inducible promoter.

### 6.43 Example 43: Benralizumab Fab cDNA-Based Vector

[1360] A benralizumab Fab cDNA-based vector is constructed comprising a transgene comprising nucleotide sequences encoding the Fab portion of the heavy and light chain sequences of benralizumab (amino acid sequences being SEQ ID NOs. 364 and 365, respectively). The nucleotide sequence coding for the Fab portion of the heavy and light chain may be the nucleotide sequence of SEQ ID NOs: 380 and 381, respectively. The transgene also comprises nucleotide sequences that encodes a signal peptide, e.g., MYRMQLLLLIALSLALVTNS (SEQ ID NO: 146). The nucleotide sequences encoding the light chain and heavy chain are separated by IRES elements or 2A cleavage sites (SEQ ID NOs: 227-230) to create a bicistronic vector. See FIG. 29A for amino acid sequence of a transgene product. The vector additionally includes a constitutive promoter, such as CB7 or an inducible promoter, such as a hypoxia-inducible promoter.

### 6.44 Example 44: Reslizumab Fab cDNA-Based Vector

[1361] A reslizumab Fab cDNA-based vector is constructed comprising a transgene comprising nucleotide sequences encoding the Fab portion of the heavy and light chain sequences of reslizumab (amino acid sequences being SEQ ID NOs. 366 and 367, respectively). The nucleotide sequence coding for the Fab portion of the heavy and light chain may be the nucleotide sequence of SEQ ID NOs: 382 and 383, respectively. The transgene also comprises nucleotide sequences that encodes a signal peptide, e.g., MYRMQLLLLIALSLALVTNS (SEQ ID NO: 146). The nucleotide sequences encoding the light chain and heavy chain are separated by IRES elements or 2A cleavage sites (SEQ ID NOs: 227-230) to create a bicistronic vector. See FIG. 29B for amino acid sequence of a transgene product. The vector additionally includes a constitutive promoter, such as CB7 or an inducible promoter, such as a hypoxia-inducible promoter.

### 6.45 Example 45: Tralokinumab Fab cDNA-Based Vector

[1362] A tralokinumab Fab cDNA-based vector is constructed comprising a transgene comprising nucleotide sequences encoding the Fab portion of the heavy and light chain sequences of tralokinumab (amino acid sequences being SEQ ID NOs. 368 and 369, respectively). The nucleotide sequence coding for the Fab portion of the heavy and light chain may be the nucleotide sequence of SEQ ID NOs: 384 and 385, respectively. The transgene also comprises nucleotide sequences that encodes a signal peptide, e.g., MYRMQLLLLIALSLALVTNS (SEQ ID NO: 146). The nucleotide sequences encoding the light chain and heavy chain are separated by IRES elements or 2A cleavage sites (SEQ ID NOs: 227-230) to create a bicistronic vector. See FIG. 29C for amino acid sequence of a transgene product. The vector additionally includes a constitutive promoter, such as CB7 or an inducible promoter, such as a hypoxia-inducible promoter.

### 6.46 Example 46: Nemolizumab Fab cDNA-Based Vector

[1363] A nemolizumab Fab cDNA-based vector is constructed comprising a transgene comprising nucleotide sequences encoding the Fab portion of the heavy and light chain sequences of nemolizumab (amino acid sequences being SEQ ID NOs. 370 and 371, respectively). The nucleotide sequence coding for the Fab portion of the heavy and light chain may be the nucleotide sequence of SEQ ID NOs: 386 and 387, respectively. The transgene also comprises nucleotide sequences that encodes a signal peptide, e.g., MYRMQLLLLIALSLALVTNS (SEQ ID NO: 146). The nucleotide sequences encoding the light chain and heavy chain are separated by IRES elements or 2A cleavage sites (SEQ ID NOs: 227-230) to create a bicistronic vector. See FIG. 29D for amino acid sequence of a transgene product. The vector additionally includes a constitutive promoter, such as CB7 or an inducible promoter, such as a hypoxia-inducible promoter.

### 6.47 Example 47: Omalizumab Fab cDNA-Based Vector

[1364] A omalizumab Fab cDNA-based vector is constructed comprising a transgene comprising nucleotide sequences encoding the Fab portion of the heavy and light chain sequences of omalizumab (amino acid sequences being SEQ ID NOs. 372 and 373, respectively). The nucleotide sequence coding for the Fab portion of the heavy and light chain may be the nucleotide sequence of SEQ ID NOs: 388 and 389, respectively. The transgene also comprises nucleotide sequences that encodes a signal peptide, e.g., MYRMQLLLLIALSLALVTNS (SEQ ID NO: 146). The nucleotide sequences encoding the light chain and heavy chain are separated by IRES elements or 2A cleavage sites (SEQ ID NOs: 227-230) to create a bicistronic vector. See FIG. 29E for amino acid sequence of a transgene product. The vector additionally includes a constitutive promoter, such as CB7 or an inducible promoter, such as a hypoxia-inducible promoter.

### 6.48 Example 48: Tezepelumab Fab cDNA-Based Vector

[1365] A tezepelumab Fab cDNA-based vector is constructed comprising a transgene comprising nucleotide sequences encoding the Fab portion of the heavy and light chain sequences of tezepelumab (amino acid sequences being SEQ ID NOs. 374 and 375, respectively). The nucleotide sequence coding for the Fab portion of the heavy and light chain may be the nucleotide sequence of SEQ ID NOs: 390 and 391, respectively. The transgene also comprises nucleotide sequences that encodes a signal peptide, e.g., MYRMQLLLLIALSLALVTNS (SEQ ID NO: 146). The nucleotide sequences encoding the light chain and heavy chain are separated by IRES elements or 2A cleavage sites (SEQ ID NOs: 227-230) to create a bicistronic vector. See FIG. 29F for amino acid sequence of a transgene product. The vector additionally includes a constitutive promoter, such as CB7 or an inducible promoter, such as a hypoxia-inducible promoter.

### 6.49 Example 49: Lanadelumab Fab cDNA-Based Vector

[1366] A lanadelumab Fab cDNA-based vector is constructed comprising a transgene comprising nucleotide sequences encoding the Fab portion of the heavy and light chain sequences of lanadelumab (amino acid sequences being SEQ ID NOs. 69 and 70, respectively). The nucleotide sequence coding for the Fab portion of the heavy and light chain may be the nucleotide sequence of SEQ ID NOs. 139 and 140, respectively. The transgene also comprises nucleotide sequences that encodes a signal peptide, e.g., MYRMQLLLLIALSLALVTNS (SEQ ID NO: 146). The nucleotide sequences encoding the light chain and heavy chain are separated by IRES elements or 2A cleavage sites (SEQ ID NOs: 227-230) to create a bicistronic vector. See FIG. 19 for amino acid sequence of a transgene product. The vector additionally includes a constitutive promoter, such as CB7 or an inducible promoter, such as a hypoxia-inducible promoter.

### 6.50 Example 50: Protein Expression Analysis of Lanadelumab in Cell Lysates and Supernatant

[1367] Cell culture studies were performed to assess the expression of full length mAb sequences (containing Fc region) from AAV constructs in human cells.

### Methods

[1368] A lanadelumab cDNA-based vector was constructed comprising a transgene comprising a nucleotide sequence encoding the heavy and light chain sequences of lanadelumab (amino acid sequences being SEQ ID NOs. 69 and 70, respectively). The nucleotide sequence coding for the heavy and light chain of lanadelumab was codon optimized to generate the three nucleotide sequences provided in Table 8 below, L01 (SEQ ID NO: 141), L02 (SEQ ID NO: 286), and L03 (SEQ ID NO: 287). L02 and L03 also have reduced incidence of CpG dimers in the sequence. The transgene also comprised a nucleotide sequence that encodes the signal peptide MYRMQLLLLIALSLALVTNS (SEQ ID NO: 146). The nucleotide sequences encoding the light chain and heavy chain were separated by a Furin-F2A linker (SEQ ID NOs: 231) or a Furin T2A linker (SEQ ID NO: 429) to create a bicistronic vector. The vector additionally included a constitutive CAG promoter (SEQ ID NO: 411). See FIG. 24A for a schematic showing the genomic configuration and sequences of the constructs are provided in Table 8 (SEQ ID NOS: 435-437)

[1369] Table 1 above provides the sequences of composite nucleic acid regulatory sequences that may be incorporated into expression cassettes and be operably linked to the transgene to promote liver-specific expression (LSPX1, LSPX2, LTP1, LTP2, or LTP3, SEQ ID NOS: 315-319, respectively), liver and muscle expression (LMTP6, LMTP13, LMTP15, LMTP18, LMTP19 or LMTP20, SEQ ID NOS: 320-326 respectively), liver and bone expression (LTBP1 or LPTP2, SEQ ID NOS: 327-328, respectively) Other promoter sequences provided, include the ApoE.hAAT (SEQ ID NO: 412, Table 1 above) promoter, wherein four copies of the liver-specific apolipoprotein E (ApoE) enhancer were placed upstream of the human alpha 1-antitrypsin (hAAT) promoter).

TABLE 8

| Name/ | |
|---|---|
| SEQ ID NO. | Sequence |
| L01 | ATGTACCGGATGCAGCTGCTGCTGCTCATTGCCCTGTCTCTGGCCCTGGTCACCAATAGC |
| SEQ ID NO: 141 | GAAGTCCAGCTGCTGGAATCTGGCGGCGGACTTGTTCAACCTGGCGGCTCTCTGAGACTG |
| | AGCTGTGCCGCTTCCGGCTTCACCTTCAGCCACTATATCATGATGTGGGTCCGACAGGCC |
| | CCTGGCAAAGGCCTTGAATGGGTGTCCGGCATCTATAGCAGCGGCGGCATCACAGTGTAC |
| | GCCGACTCTGTGAAGGGCAGATTCACCATCAGCCGGGACAACAGCAAGAACACCCTGTAC |
| | CTGCAGATGAACAGCCTGAGAGCCGAGGACACCGCCGTGTACTACTGCGCCTATAGAAGA |
| | ATCGGCGTGCCCAGACGGGACGAGTTCGATATTTGGGGCCAGGGCACCATGGTCACCGTG |
| | TCTAGCGCCTCTACAAAGGGCCCTAGCGTGTTCCCTCTGGCTCCTAGCAGCAAGAGCACA |
| | AGCGGAGGAACAGCCGCTCTGGGCTGTCTGGTCAAGGACTACTTTCCCGAGCCTGTGACC |
| | GTGTCCTGGAATAGCGGAGCACTGACAAGCGGCGTGCACACCTTTCCAGCTGTGCTGCAA |
| | AGCAGCGGCCTGTACTCTCTGAGCAGCGTGGTCACAGTGCCAAGCTCTAGCCTGGGCACC |
| | CAGACCTACATCTGCAATGTGAACCACAAGCCTAGCAACACCAAGGTGGACAAGAGAGTG |
| | GAACCCAAGAGCTGCGACAAGACCCACACCTGTCCTCCATGTCCTGCTCCAGAACTGCTC |
| | GGCGGACCTTCCGTGTTCCTGTTTCCTCCAAAGCCTAAGGACACCCTGATGATCAGCAGA |
| | ACCCCTGAAGTGACCTGCGTGGTGGTGGATGTGTCCCACGAGGATCCCGAAGTGAAGTTC |
| | AATTGGTACGTGGACGGCGTGGAAGTGCACAACGCCAAGACCAAGCCTAGAGAGGAACAG |
| | TACAACAGCACCTACAGAGTGGTGTCCGTGCTGACCGTGCTGCACCAGGATTGGCTGAAC |
| | GGCAAAGAGTACAAGTGCAAGGTGTCCAACAAGGCCCTGCCTGCTCCTATCGAGAAAACC |
| | ATCAGCAAGGCCAAGGGCCAGCCTAGGGAACCCCAGGTTTACACACTGCCTCCAAGCCGG |
| | GAAGAGATGACCAAGAACCAGGTGTCCCTGACCTGCCTCGTGAAGGGCTTCTACCCTTCC |
| | GATATCGCCGTGGAATGGGAGAGCAATGGCCAGCCAGAGAACAACTACAAGACAACCCCT |
| | CCTGTGCTGGACAGCGACGGCTCATTCTTCCTGTACAGCAAGCTGACAGTGGACAAGTCC |
| | AGATGGCAGCAGGGCAACGTGTTCAGCTGCAGCGTGATGCACGAGGCCCTGCACAACCAC |
| | TACACCCAGAAGAGTCTGAGCCTGTCTCCAGGCCTGCGGAAGAGAAGGGCTCCTGTGAAG |
| | CAGACCCTGAACTTCGACCTGCTGAAACTGGCCGGCGACGTGGAAAGCAACCCCGGACCT |
| | ATGTATAGAATGCAGCTCCTCCTGCTGATCGCACTGAGCCTGGCTCTCGTGACCAACAGC |
| | GACATCCAGATGACACAGAGCCCCAGCACACTGTCTGCCAGCGTGGGAGACAGAGTGACC |
| | ATCACCTGTAGAGCCAGCCAGTCCATCTCCTCTTGGCTGGCCTGGTATCAGCAAAAGCCT |
| | GGCAAGGCCCCTAAGCTGCTGATCTACAAGGCCTCCACACTGGAAAGCGGGGTGCCCTCC |
| | AGATTTTCTGGCAGCGGATCTGGCACCGAGTTCACCCTGACCATCAGTAGCCTGCAGCCT |
| | GACGACTTCGCCACCTACTACTGCCAGCAGTACAATACCTACTGGACCTTCGGCCAGGGA |
| | ACAAAGGTGGAAATCAAGCGGACTGTGGCCGCTCCAAGCGTGTTCATCTTTCCACCTAGC |
| | GACGAGCAGCTGAAGTCCGGCACAGCCTCTGTTGTGTGCCTGCTGAACAACTTCTACCCC |
| | AGAGAAGCCAAGGTGCAGTGGAAAGTGGACAATGCCCTGCAGAGCGGCAACTCCCAAGAG |
| | AGCGTGACAGAGCAGGACTCCAAGGATTCCACCTACAGCCTGTCTAGCACCCTGACACTG |
| | AGCAAGGCCGACTACGAGAAGCACAAAGTGTATGCCTGCGAAGTGACCCACCAGGGCCTT |
| | AGCTCTCCAGTGACCAAGAGCTTCAACCGGGGCGAGTGTTGATAA |
| L02 | ATGTACAGAATGCAGCTGCTGCTGCTCATTGCCCTGTCTCTGGCCCTGGTCACCAATTCT |
| SEQ ID NO: 286 | GAGGTCCAGCTGCTTGAGAGTGGTGGTGGACTGGTTCAGCCTGGTGGCAGCCTGAGACTG |
| | TCTTGTGCTGCCTCTGGCTTCACCTTCAGCCACTATATCATGATGTGGGTCAGACAGGCC |
| | CCTGGCAAAGGCCTGGAATGGGTGTCAGGCATCTACAGCAGTGGTGGCATCACAGTGTAT |
| | GCTGACTCTGTGAAGGGCAGATTCACCATCAGCAGAGACAACAGCAAGAACACCCTGTAC |
| | CTGCAGATGAACTCCCTGAGAGCTGAGGACACAGCAGTGTACTACTGTGCCTATAGAAGA |
| | ATTGGGGTGCCCAGAAGGGATGAGTTTGACATCTGGGGCCAGGGCACCATGGTTACAGTG |
| | TCCTCTGCCAGCACAAAGGGCCCCTCTGTTTTTCCACTGGCTCCCAGCAGCAAGAGCACC |
| | AGTGGTGGAACAGCTGCCCTGGGCTGTCTGGTCAAGGATTACTTCCCTGAGCCTGTGACT |
| | GTGTCCTGGAACTCTGGGGCTCTGACTTCTGGGGTGCACACCTTTCCAGCTGTGCTGCAG |
| | TCCTCTGGCCTGTACTCTCTGTCCTCTGTGGTCACAGTGCCTAGCTCTAGCCTGGGCACA |
| | CAGACCTACATCTGCAATGTGAACCACAAGCCTAGCAACACCAAGGTGGACAAGAGAGTG |
| | GAACCCAAGAGCTGTGACAAGACCCACACCTGTCCTCCATGTCCTGCTCCAGAACTGCTT |
| | GGAGGCCCTTCTGTGTTCCTGTTTCCTCCAAAGCCTAAGGACACCCTGATGATCAGCAGA |
| | ACCCCTGAAGTGACCTGTGTGGTGGTTGATGTGTCCCATGAGGACCCAGAAGTGAAGTTC |
| | AATTGGTATGTGGATGGGGTTGAAGTGCACAATGCCAAGACCAAGCCTAGAGAGGAACAG |
| | TACAACAGCACCTACAGAGTGGTTTCTGTGCTGACAGTGCTGCACCAGGACTGGCTGAAT |
| | GGCAAAGAGTACAAGTGCAAGGTGTCCAACAAGGCCCTGCCTGCTCCTATTGAGAAAACC |
| | ATCTCCAAGGCCAAGGGCCAGCCAAGAGAACCCCAGGTTTACACCCTGCCACCTAGCAGA |
| | GAAGAGATGACCAAGAACCAGGTGTCCCTGACCTGCCTGGTTAAGGGCTTCTACCCCTCT |
| | GACATTGCTGTGGAATGGGAGAGCAATGGCCAGCCTGAAAACAACTACAAGACAACCCCT |
| | CCTGTGCTGGACTCTGATGGCTCATTCTTCCTGTACAGCAAGCTGACTGTGGACAAGTCC |
| | AGATGGCAGCAGGGAAATGTGTTCAGCTGCTCTGTGATGCATGAGGCCCTGCACAACCAC |
| | TACACCCAGAAAAGTCTGTCTCTGTCCCCTGGCAGAAAGAGAAGAGGCTCTGGAGAAGGC |
| | AGAGGCTCCCTGCTGACATGTGGGGATGTTGAAGAGAATCCTGGGCCTATGTATAGGATG |
| | CAACTGCTCCTCCTGATTGCTCTGAGCCTGGCTCTTGTGACCAACTCTGACATCCAGATG |
| | ACACAGAGCCCCTCCACACTGTCTGCATCTGTGGGAGACAGAGTGACCATCACCTGTAGA |
| | GCCAGCCAGTCTATCTCTAGCTGGCTGGCCTGGTATCAGCAAAAGCCTGGCAAGGCCCCT |
| | AAGCTGCTGATCTACAAGGCCAGCACACTTGAGTCAGGGGTGCCCTCCAGATTTTCTGGC |
| | TCTGGATCTGGCACAGAGTTCACCCTGACCATCAGCTCCCTGCAGCCAGATGACTTTGCC |
| | ACCTACTACTGCCAGCAGTACAATACCTACTGGACCTTTGGCCAGGGAACAAAGGTGGAA |
| | ATCAAGAGAACAGTGGCTGCCCCATCTGTGTTCATCTTCCCACCATCTGATGAACAGCTG |
| | AAGTCTGGCACTGCCTCTGTTGTGTGCCTGCTGAACAACTTTTACCCCAGAGAAGCCAAG |
| | GTGCAGTGGAAAGTGGATAATGCCCTGCAGTCTGGCAATAGCCAAGAATCTGTGACAGAG |
| | CAGGACTCCAAGGATTCCACCTACAGCCTGAGCAGCACCCTGACACTGAGCAAGGCTGAC |
| | TATGAGAAGCACAAAGTGTATGCCTGTGAAGTGACACACCAGGGACTGAGCAGCCCAGTG |
| | ACCAAGAGCTTCAACAGGGGAGAGTGCTGATAA |
| L03 | ATGTACAGAATGCAGCTGCTGCTGCTCATTGCCCTGTCTCTGGCCCTGGTCACCAATTCT |
| SEQ ID NO: 287 | GAGGTCCAGCTGCTTGAGAGTGGTGGTGGACTGGTTCAGCCTGGTGGCAGCCTGAGACTG |
| | TCTTGTGCTGCCTCTGGCTTCACCTTCAGCCACTATATCATGATGTGGGTCAGACAGGCC |
| | CCTGGCAAAGGCCTGGAATGGGTGTCAGGCATCTACAGCAGTGGTGGCATCACAGTGTAT |
| | GCTGACTCTGTGAAGGGCAGATTCACCATCAGCAGAGACAACAGCAAGAACACCCTGTAC |
| | CTGCAGATGAACTCCCTGAGAGCTGAGGACACAGCAGTGTACTACTGTGCCTATAGAAGA |
| | ATTGGGGTGCCCAGAAGGGATGAGTTTGACATCTGGGGCCAGGGCACCATGGTTACAGTG |
| | TCCTCTGCCAGCACAAAGGGCCCCTCTGTTTTTCCACTGGCTCCCAGCAGCAAGAGCACC |
| | AGTGGTGGAACAGCTGCCCTGGGCTGTCTGGTCAAGGATTACTTCCCTGAGCCTGTGACT |
| | GTGTCCTGGAACTCTGGGGCTCTGACCTCTGGGGTGCACACCTTTCCAGCTGTGCTGCAG |
| | TCCTCTGGCCTGTACTCTCTGTCCTCTGTGGTCACAGTGCCTAGCTCTAGCCTGGGCACA |
| | CAGACCTACATCTGCAATGTGAACCACAAGCCTAGCAACACCAAGGTGGACAAGAGAGTG |
| | GAACCCAAGAGCTGTGACAAGACCCACACCTGTCCTCCATGTCCTGCTCCAGAACTGCTT |
| | GGAGGCCCTTCTGTGTTCCTGTTTCCTCCAAAGCCTAAGGACACCCTGATGATCAGCAGA |
| | ACCCCTGAAGTGACCTGTGTGGTGGTTGATGTGTCCCATGAGGACCCAGAAGTGAAGTTC |
| | AATTGGTATGTGGATGGGGTTGAAGTGCACAATGCCAAGACCAAGCCTAGAGAGGAACAG |
| | TACAACAGCACCTACAGAGTGGTTTCTGTGCTGACAGTGCTGCACCAGGACTGGCTGAAT |
| | GGCAAAGAGTACAAGTGCAAGGTGTCCAACAAGGCCCTGCCTGCTCCTATTGAGAAAACC |
| | ATCTCCAAGGCCAAGGGCCAGCCAAGAGAACCCCAGGTTTACACCCTGCCACCTAGCAGA |
| | GAAGAGATGACCAAGAACCAGGTGTCCCTGACCTGCCTGGTTAAGGGCTTCTACCCCTCT |
| | GACATTGCTGTGGAATGGGAGAGCAATGGCCAGCCTGAAAACAACTACAAGACAACCCCT |
| | CCTGTGCTGGACTCTGATGGCTCATTCTTCCTGTACAGCAAGCTGACTGTGGACAAGTCC |
| | AGATGGCAGCAGGGAAATGTGTTCAGCTGCTCTGTGATGCATGAGGCCCTGCACAACCAC |
| | TACACCCAGAAAAGTCTGTCTCTGTCCCCTGGCAGAAAGAGAAGAGGATCAGGGGCCCCA |
| | GTGAAGCAGACCCTGAACTTTGATCTGCTGAAGCTGGCTGGGGATGTTGAGAGCAACCCT |
| | GGACCTATGTATAGGATGCAACTGCTCCTCCTGATTGCTCTGAGCCTGGCTCTTGTGACC |
| | AACTCTGACATCCAGATGACACAGAGCCCCTCCACACTGTCTGCATCTGTGGGAGACAGA |
| | GTGACCATCACCTGTAGAGCCAGCCAGTCTATCTCTTCCTGGCTGGCCTGGTATCAGCAA |
| | AAGCCTGGCAAGGCCCCTAAGCTGCTGATCTACAAGGCCAGCACACTTGAGTCAGGGGTG |
| | CCCTCCAGATTTTCTGGCTCTGGATCTGGCACAGAGTTCACCCTGACCATCAGCTCCCTG |
| | CAGCCAGATGACTTTGCCACCTACTACTGCCAGCAGTACAATACCTACTGGACCTTTGGC |
| | CAGGGAACAAAGGTGGAAATCAAGAGAACAGTGGCTGCCCCATCTGTGTTCATCTTCCCA |
| | CCATCTGATGAACAGCTGAAGTCTGGCACTGCCTCTGTTGTGTGCCTGCTGAACAACTTT |
| | TACCCTAGAGAAGCCAAGGTGCAGTGGAAAGTGGATAATGCCCTGCAGTCTGGCAATAGC |
| | CAAGAATCTGTGACAGAGCAGGACTCCAAGGATTCCACCTACAGCCTGAGCAGCACCCTG |
| | ACACTGAGCAAGGCTGACTATGAGAAGCACAAAGTGTATGCCTGTGAAGTGACACACCAG |
| | GGACTGAGCAGCCCAGTGACCAAGAGCTTCAACAGGGGAGAGTGCTGATAA |
| CAG.LAN.F2A | ctagtcgacattgattattgactagttattaatagtaatcaattacggggtcattagttc |
| (CAG.L01) | atagcccatatatggagttccgcgttacataacttacggtaaatggcccgcctggctgac |
| SEQ ID NO: 435 | cgcccaacgacccccgcccattgacgtcaataatgacgtatgttcccatagtaacgccaa |
| | tagggactttccattgacgtcaatgggtggagtatttacggtaaactgcccacttggcag |
| | tacatcaagtgtatcatatgccaagtacgccccctattgacgtcaatgacggtaaatggc |
| | ccgcctggcattatgcccagtacatgaccttatgggactttcctacttggcagtacatct |
| | acgtattagtcatcgctattaccatggtcgaggtgagccccacgttctgcttcactctcc |
| | ccatctcccccccctccccacccccaattttgtatttatttattttttaattattttgtg |
| | cagcgatgggggcggggggggggggggggcgcgcgccaggcggggcggggcggggcgagg |
| | ggcggggcggggcgaggcggagaggtgcggcggcagccaatcagagcggcgcgctccgaa |
| | agtttccttttatggcgaggcggcggcggcggcggccctataaaaagcgaagcgcgcggc |
| | gggcgggagtcgctgcgcgctgccttcgccccgtgccccgctccgccgccgcctcgcgcc |
| | gcccgccccggctctgactgaccgcgttactcccacaggtgagcgggcgggacggccctt |
| | ctcctccgggctgtaattagcgcttggtttaatgacggcttgtttcttttctgtggctgc |
| | gtgaaagccttgaggggctccgggagggccctttgtgcggggggagcggctcggggggtg |
| | cgtgcgtgtgtgtgtgcgtggggagcgccgcgtgcggctccgcgctgcccggcggctgtg |
| | agcgctgcgggcgcggcgcggggctttgtgcgctccgcagtgtgcgcgaggggagcgcgg |
| | ccgggggcggtgccccgcggtgcggggggggctgcgaggggaacaaaggctgcgtgcggg |
| | gtgtgtgcgtgggggggtgagcagggggtgtgggcgcgtcggtcgggctgcaaccccccc |
| | tgcacccccctccccgagttgctgagcacggcccggcttcgggtgcggggctccgtacgg |
| | ggcgtggcgcggggctcgccgtgccgggcggggggtggcggcaggtgggggtgccgggcg |
| | gggcggggccgcctcgggccggggagggctcgggggaggggcgcggcggcccccggagcg |
| | ccggcggctgtcgaggcgcggcgagccgcagccattgccttttatggtaatcgtgcgaga |
| | gggcgcagggacttcctttgtcccaaatctgtgcggagccgaaatctgggaggcgccgcc |
| | gcaccccctctagcgggcgcggggcgaagcggtgcggcgccggcaggaaggaaatgggcg |
| | gggagggccttcgtgcgtcgccgcgccgccgtccccttctccctctccagcctcggggct |
| | gtccgcggggggacggctgccttcgggggggacggggcagggcggggttcggcttctggc |
| | gtgtgaccggcggctctagagcctctgctaaccatgttcatgccttcttctttttcctac |
| | agctcctgggcaacgtgctggttattgtgctgtctcatcattttggcaaagaattcgcta |
| | gcgggcactttgcactggaacttacaacacccgagcaaggacgcgactctccaccatgta |
| | ccggatgcagctgctgctgctcattgccctgtctctggccctggtcaccaatagcgaagt |
| | ccagctgctggaatctggcggcggacttgttcaacctggcggctctctgagactgagctg |
| | tgccgcttccggcttcaccttcagccactatatcatgatgtgggtccgacaggcccctgg |
| | caaaggccttgaatgggtgtccggcatctatagcagcggcggcatcacagtgtacgccga |
| | ctctgtgaagggcagattcaccatcagccgggacaacagcaagaacaccctgtacctgca |
| | gatgaacagcctgagagccgaggacaccgccgtgtactactgcgcctatagaagaatcgg |
| | cgtgcccagacgggacgagttcgatatttggggccagggcaccatggtcaccgtgtctag |
| | cgcctctacaaagggccctagcgtgttccctctggctcctagcagcaagagcacaagcgg |
| | aggaacagccgctctgggctgtctggtcaaggactactttcccgagcctgtgaccgtgtc |
| | ctggaatagcggagcactgacaagcggcgtgcacacctttccagctgtgctgcaaagcag |
| | cggcctgtactctctgagcagcgtggtcacagtgccaagctctagcctgggcacccagac |
| | ctacatctgcaatgtgaaccacaagcctagcaacaccaaggtggacaagagagtggaacc |
| | caagagctgcgacaagacccacacctgtcctccatgtcctgctccagaactgctcggcgg |
| | accttccgtgttcctgtttcctccaaagcctaaggacaccctgatgatcagcagaacccc |
| | tgaagtgacctgcgtggtggtggatgtgtcccacgaggatcccgaagtgaagttcaattg |
| | gtacgtggacggcgtggaagtgcacaacgccaagaccaagcctagagaggaacagtacaa |
| | cagcacctacagagtggtgtccgtgctgaccgtgctgcaccaggattggctgaacggcaa |
| | agagtacaagtgcaaggtgtccaacaaggccctgcctgctcctatcgagaaaaccatcag |
| | caaggccaagggccagcctagggaaccccaggtttacacactgcctccaagccgggaaga |
| | gatgaccaagaaccaggtgtccctgacctgcctcgtgaagggcttctacccttccgatat |
| | cgccgtggaatgggagagcaatggccagccagagaacaactacaagacaacccctcctgt |
| | gctggacagcgacggctcattcttcctgtacagcaagctgacagtggacaagtccagatg |
| | gcagcagggcaacgtgttcagctgcagcgtgatgcacgaggccctgcacaaccactacac |
| | ccagaagagtctgagcctgtctccaggcctgcggaagagaagggctcctgtgaagcagac |
| | cctgaacttcgacctgctgaaactggccggcgacgtggaaagcaaccccggacctatgta |
| | tagaatgcagctcctcctgctgatcgcactgagcctggctctcgtgaccaacagcgacat |
| | ccagatgacacagagccccagcacactgtctgccagcgtgggagacagagtgaccatcac |
| | ctgtagagccagccagtccatctcctcttggctggcctggtatcagcaaaagcctggcaa |
| | ggcccctaagctgctgatctacaaggcctccacactggaaagcggggtgccctccagatt |
| | ttctggcagcggatctggcaccgagttcaccctgaccatcagtagcctgcagcctgacga |
| | cttcgccacctactactgccagcagtacaatacctactggaccttcggccagggaacaaa |
| | ggtggaaatcaagcggactgtggccgctccaagcgtgttcatctttccacctagcgacga |
| | gcagctgaagtccggcacagcctctgttgtgtgcctgctgaacaacttctaccccagaga |
| | agccaaggtgcagtggaaagtggacaatgccctgcagagcggcaactcccaagagagcgt |
| | gacagagcaggactccaaggattccacctacagcctgtctagcaccctgacactgagcaa |
| | ggccgactacgagaagcacaaagtgtatgcctgcgaagtgacccaccagggccttagctc |
| | tccagtgaccaagagcttcaaccggggcgagtgttgataaagcggccgcggtacctctag |
| | agtcgacccgggcggcctcgaggacggggtgaactacgcctgaggatccgatctttttcc |
| | ctctgccaaaaattatggggacatcatgaagccccttgagcatctgacttctggctaata |
| | aaggaaatttattttcattgcaatagtgtgttggaattttttgtgtctctcactcg |
| CAG.LANv2.F2A | gacattgattattgactagttattaatagtaatcaattacggggtcattagttcatagcc |
| (CAG.L03) | catatatggagttccgcgttacataacttacggtaaatggcccgcctggctgaccgccca |
| SEQ ID NO: 436 | acgacccccgcccattgacgtcaataatgacgtatgttcccatagtaacgccaataggga |
| | ctttccattgacgtcaatgggtggagtatttacggtaaactgcccacttggcagtacatc |
| | aagtgtatcatatgccaagtacgccccctattgacgtcaatgacggtaaatggcccgcct |
| | ggcattatgcccagtacatgaccttatgggactttcctacttggcagtacatctacgtat |
| | tagtcatcgctattaccatggtcgaggtgagccccacgttctgcttcactctccccatct |
| | cccccccctccccacccccaattttgtatttatttattttttaattattttgtgcagcga |
| | tgggggcggggggggggggggggcgcgcgccaggcggggcggggcggggcgaggggcggg |
| | gcggggcgaggcggagaggtgcggcggcagccaatcagagcggcgcgctccgaaagtttc |
| | cttttatggcgaggcggcggcggcggcggccctataaaaagcgaagcgcgcggcgggcgg |
| | gagtcgctgcgcgctgccttcgccccgtgccccgctccgccgccgcctcgcgccgcccgc |
| | cccggctctgactgaccgcgttactcccacaggtgagcgggcgggacggcccttctcctc |
| | cgggctgtaattagcgcttggtttaatgacggcttgtttcttttctgtggctgcgtgaaa |
| | gccttgaggggctccgggagggccctttgtgcggggggagcggctcggggggtgcgtgcg |
| | tgtgtgtgtgcgtggggagcgccgcgtgcggctccgcgctgcccggcggctgtgagcgct |
| | gcgggcgcggcgcggggctttgtgcgctccgcagtgtgcgcgaggggagcgcggccgggg |
| | gcggtgccccgcggtgcggggggggctgcgaggggaacaaaggctgcgtgcggggtgtgt |
| | gcgtgggggggtgagcagggggtgtgggcgcgtcggtcgggctgcaaccccccctgcacc |
| | cccctccccgagttgctgagcacggcccggcttcgggtgcggggctccgtacggggcgtg |
| | gcgcggggctcgccgtgccgggcggggggtggcggcaggtgggggtgccgggcggggcgg |
| | ggccgcctcgggccggggagggctcgggggaggggcgcggcggcccccggagcgccggcg |
| | gctgtcgaggcgcggcgagccgcagccattgccttttatggtaatcgtgcgagagggcgc |
| | agggacttcctttgtcccaaatctgtgcggagccgaaatctgggaggcgccgccgcaccc |
| | cctctagcgggcgcggggcgaagcggtgcggcgccggcaggaaggaaatgggcggggagg |
| | gccttcgtgcgtcgccgcgccgccgtccccttctccctctccagcctcggggctgtccgc |
| | ggggggacggctgccttcgggggggacggggcagggcggggttcggcttctggcgtgtga |
| | ccggcggctctagagcctctgctaaccatgttcatgccttcttctttttcctacagctcc |
| | tgggcaacgtgctggttattgtgctgtctcatcattttggcaaagaattcgccgccacca |
| | tgtacagaatgcagctgctgctgctcattgccctgtctctggccctggtcaccaattctg |
| | aggtccagctgcttgagagtggtggtggactggttcagcctggtggcagcctgagactgt |
| | cttgtgctgcctctggcttcaccttcagccactatatcatgatgtgggtcagacaggccc |
| | ctggcaaaggcctggaatgggtgtcaggcatctacagcagtggtggcatcacagtgtatg |
| | ctgactctgtgaagggcagattcaccatcagcagagacaacagcaagaacaccctgtacc |
| | tgcagatgaactccctgagagctgaggacacagcagtgtactactgtgcctatagaagaa |
| | ttggggtgcccagaagggatgagtttgacatctggggccagggcaccatggttacagtgt |
| | cctctgccagcacaaagggcccctctgtttttccactggctcccagcagcaagagcacca |
| | gtggtggaacagctgccctgggctgtctggtcaaggattacttccctgagcctgtgactg |
| | tgtcctggaactctggggctctgacctctggggtgcacacctttccagctgtgctgcagt |
| | cctctggcctgtactctctgtcctctgtggtcacagtgcctagctctagcctgggcacac |
| | agacctacatctgcaatgtgaaccacaagcctagcaacaccaaggtggacaagagagtgg |
| | aacccaagagctgtgacaagacccacacctgtcctccatgtcctgctccagaactgcttg |
| | gaggcccttctgtgttcctgtttcctccaaagcctaaggacaccctgatgatcagcagaa |
| | cccctgaagtgacctgtgtggtggttgatgtgtcccatgaggacccagaagtgaagttca |
| | attggtatgtggatggggttgaagtgcacaatgccaagaccaagcctagagaggaacagt |
| | acaacagcacctacagagtggtttctgtgctgacagtgctgcaccaggactggctgaatg |
| | gcaaagagtacaagtgcaaggtgtccaacaaggccctgcctgctcctattgagaaaacca |
| | tctccaaggccaagggccagccaagagaaccccaggtttacaccctgccacctagcagag |
| | aagagatgaccaagaaccaggtgtccctgacctgcctggttaagggcttctacccctctg |
| | acattgctgtggaatgggagagcaatggccagcctgaaaacaactacaagacaacccctc |
| | ctgtgctggactctgatggctcattcttcctgtacagcaagctgactgtggacaagtcca |
| | gatggcagcagggaaatgtgttcagctgctctgtgatgcatgaggccctgcacaaccact |
| | acacccagaaaagtctgtctctgtcccctggcagaaagagaagaggatcaggggccccag |
| | tgaagcagaccctgaactttgatctgctgaagctggctggggatgttgagagcaaccctg |
| | gacctatgtataggatgcaactgctcctcctgattgctctgagcctggctcttgtgacca |
| | actctgacatccagatgacacagagcccctccacactgtctgcatctgtgggagacagag |
| | tgaccatcacctgtagagccagccagtctatctcttcctggctggcctggtatcagcaaa |
| | agcctggcaaggcccctaagctgctgatctacaaggccagcacacttgagtcaggggtgc |
| | cctccagattttctggctctggatctggcacagagttcaccctgaccatcagctccctgc |
| | agccagatgactttgccacctactactgccagcagtacaatacctactggacctttggcc |
| | agggaacaaaggtggaaatcaagagaacagtggctgccccatctgtgttcatcttcccac |
| | catctgatgaacagctgaagtctggcactgcctctgttgtgtgcctgctgaacaactttt |
| | accctagagaagccaaggtgcagtggaaagtggataatgccctgcagtctggcaatagcc |
| | aagaatctgtgacagagcaggactccaaggattccacctacagcctgagcagcaccctga |
| | cactgagcaaggctgactatgagaagcacaaagtgtatgcctgtgaagtgacacaccagg |
| | gactgagcagcccagtgaccaagagcttcaacaggggagagtgctgataactcgaggacg |
| | gggtgaactacgcctgaggatccgatctttttccctctgccaaaaattatggggacatca |
| | tgaagccccttgagcatctgacttctggctaataaaggaaatttattttcattgcaatag |
| | tgtgttggaattttttgtgtctctca |
| CAG.LANv2.T2A | gacattgattattgactagttattaatagtaatcaattacggggtcattagttcatagcc |
| (CAG.L02) | catatatggagttccgcgttacataacttacggtaaatggcccgcctggctgaccgccca |
| SEQ ID NO: 437 | acgacccccgcccattgacgtcaataatgacgtatgttcccatagtaacgccaataggga |
| | ctttccattgacgtcaatgggtggagtatttacggtaaactgcccacttggcagtacatc |
| | aagtgtatcatatgccaagtacgccccctattgacgtcaatgacggtaaatggcccgcct |
| | ggcattatgcccagtacatgaccttatgggactttcctacttggcagtacatctacgtat |
| | tagtcatcgctattaccatggtcgaggtgagccccacgttctgcttcactctccccatct |
| | cccccccctccccacccccaattttgtatttatttattttttaattattttgtgcagcga |
| | tgggggcggggggggggggggggcgcgcgccaggcggggcggggcggggcgaggggcggg |
| | gcggggcgaggcggagaggtgcggcggcagccaatcagagcggcgcgctccgaaagtttc |
| | cttttatggcgaggcggcggcggcggcggccctataaaaagcgaagcgcgcggcgggcgg |
| | gagtcgctgcgcgctgccttcgccccgtgccccgctccgccgccgcctcgcgccgcccgc |
| | cccggctctgactgaccgcgttactcccacaggtgagcgggcgggacggcccttctcctc |
| | cgggctgtaattagcgcttggtttaatgacggcttgtttcttttctgtggctgcgtgaaa |
| | gccttgaggggctccgggagggccctttgtgcggggggagcggctcggggggtgcgtgcg |
| | tgtgtgtgtgcgtggggagcgccgcgtgcggctccgcgctgcccggcggctgtgagcgct |
| | gcgggcgcggcgcggggctttgtgcgctccgcagtgtgcgcgaggggagcgcggccgggg |
| | gcggtgccccgcggtgcggggggggctgcgaggggaacaaaggctgcgtgcggggtgtgt |
| | gcgtgggggggtgagcagggggtgtgggcgcgtcggtcgggctgcaaccccccctgcacc |
| | cccctccccgagttgctgagcacggcccggcttcgggtgcggggctccgtacggggcgtg |
| | gcgcggggctcgccgtgccgggcggggggtggcggcaggtgggggtgccgggcggggcgg |
| | ggccgcctcgggccggggagggctcgggggaggggcgcggcggcccccggagcgccggcg |
| | gctgtcgaggcgcggcgagccgcagccattgccttttatggtaatcgtgcgagagggcgc |
| | agggacttcctttgtcccaaatctgtgcggagccgaaatctgggaggcgccgccgcaccc |
| | cctctagcgggcgcggggcgaagcggtgcggcgccggcaggaaggaaatgggcggggagg |
| | gccttcgtgcgtcgccgcgccgccgtccccttctccctctccagcctcggggctgtccgc |
| | ggggggacggctgccttcgggggggacggggcagggcggggttcggcttctggcgtgtga |
| | ccggcggctctagagcctctgctaaccatgttcatgccttcttctttttcctacagctcc |
| | tgggcaacgtgctggttattgtgctgtctcatcattttggcaaagaattcgccgccacca |
| | tgtacagaatgcagctgctgctgctcattgccctgtctctggccctggtcaccaattctg |
| | aggtccagctgcttgagagtggtggtggactggttcagcctggtggcagcctgagactgt |
| | cttgtgctgcctctggcttcaccttcagccactatatcatgatgtgggtcagacaggccc |
| | ctggcaaaggcctggaatgggtgtcaggcatctacagcagtggtggcatcacagtgtatg |
| | ctgactctgtgaagggcagattcaccatcagcagagacaacagcaagaacaccctgtacc |
| | tgcagatgaactccctgagagctgaggacacagcagtgtactactgtgcctatagaagaa |
| | ttggggtgcccagaagggatgagtttgacatctggggccagggcaccatggttacagtgt |
| | cctctgccagcacaaagggcccctctgtttttccactggctcccagcagcaagagcacca |
| | gtggtggaacagctgccctgggctgtctggtcaaggattacttccctgagcctgtgactg |
| | tgtcctggaactctggggctctgacttctggggtgcacacctttccagctgtgctgcagt |
| | cctctggcctgtactctctgtcctctgtggtcacagtgcctagctctagcctgggcacac |
| | agacctacatctgcaatgtgaaccacaagcctagcaacaccaaggtggacaagagagtgg |
| | aacccaagagctgtgacaagacccacacctgtcctccatgtcctgctccagaactgcttg |
| | gaggcccttctgtgttcctgtttcctccaaagcctaaggacaccctgatgatcagcagaa |
| | cccctgaagtgacctgtgtggtggttgatgtgtcccatgaggacccagaagtgaagttca |
| | attggtatgtggatggggttgaagtgcacaatgccaagaccaagcctagagaggaacagt |
| | acaacagcacctacagagtggtttctgtgctgacagtgctgcaccaggactggctgaatg |
| | gcaaagagtacaagtgcaaggtgtccaacaaggccctgcctgctcctattgagaaaacca |
| | tctccaaggccaagggccagccaagagaaccccaggtttacaccctgccacctagcagag |
| | aagagatgaccaagaaccaggtgtccctgacctgcctggttaagggcttctacccctctg |
| | acattgctgtggaatgggagagcaatggccagcctgaaaacaactacaagacaacccctc |
| | ctgtgctggactctgatggctcattcttcctgtacagcaagctgactgtggacaagtcca |
| | gatggcagcagggaaatgtgttcagctgctctgtgatgcatgaggccctgcacaaccact |
| | acacccagaaaagtctgtctctgtcccctggcagaaagagaagaggctctggagaaggca |
| | gaggctccctgctgacatgtggggatgttgaagagaatcctgggcctatgtataggatgc |
| | aactgctcctcctgattgctctgagcctggctcttgtgaccaactctgacatccagatga |
| | cacagagcccctccacactgtctgcatctgtgggagacagagtgaccatcacctgtagag |
| | ccagccagtctatctctagctggctggcctggtatcagcaaaagcctggcaaggccccta |
| | agctgctgatctacaaggccagcacacttgagtcaggggtgccctccagattttctggct |
| | ctggatctggcacagagttcaccctgaccatcagctccctgcagccagatgactttgcca |
| | cctactactgccagcagtacaatacctactggacctttggccagggaacaaaggtggaaa |
| | tcaagagaacagtggctgccccatctgtgttcatcttcccaccatctgatgaacagctga |
| | agtctggcactgcctctgttgtgtgcctgctgaacaacttttaccccagagaagccaagg |
| | tgcagtggaaagtggataatgccctgcagtctggcaatagccaagaatctgtgacagagc |
| | aggactccaaggattccacctacagcctgagcagcaccctgacactgagcaaggctgact |
| | atgagaagcacaaagtgtatgcctgtgaagtgacacaccagggactgagcagcccagtga |
| | ccaagagcttcaacaggggagagtgctgataactcgaggacggggtgaactacgcctgag |
| | gatccgatctttttccctctgccaaaaattatggggacatcatgaagccccttgagcatc |
| | tgacttctggctaataaaggaaatttattttcattgcaatagtgtgttggaattttttgt |
| | gtctctcactcg |
| TBG.LANv2.T2A | aggttaatttttaaaaagcagtcaaaagtccaagtggcccttggcagcatttactctctc |
| (TBG.L02) | tgtttgctctggttaataatctcaggagcacaaacattccagatccaggttaatttttaa |
| SEQ ID NO: 438 | aaagcagtcaaaagtccaagtggcccttggcagcatttactctctctgtttgctctggtt |
| | aataatctcaggagcacaaacattccagatccggcgcgccagggctggaagctacctttg |
| | acatcatttcctctgcgaatgcatgtataatttctacagaacctattagaaaggatcacc |
| | cagcctctgcttttgtacaactttcccttaaaaaactgccaattccactgctgtttggcc |
| | caatagtgagaactttttcctgctgcctcttggtgcttttgcctatggcccctattctgc |
| | ctgctgaagacactcttgccagcatggacttaaacccctccagctctgacaatcctcttt |
| | ctcttttgttttacatgaagggtctggcagccaaagcaatcactcaaagttcaaacctta |
| | tcattttttgctttgttcctcttggccttggttttgtacatcagctttgaaaataccatc |
| | ccagggttaatgctggggttaatttataactaagagtgctctagttttgcaatacaggac |
| | atgctataaaaatggaaagatgttgctttctgagagacagctttattgcggtagtttatc |
| | acagttaaattgctaacgcagtcagtgcttctgacacaacagtctcgaacttaagctgca |
| | gaagttggtcgtgaggcactgggcaggtaagtatcaaggttacaagacaggtttaaggag |
| | accaatagaaactgggcttgtcgagacagagaagactcttgcgtttctgataggcaccta |
| | ttggtcttactgacatccactttgcctttctctccacaggtgtccactcccagttcaatt |
| | acagctcttaaggctagagtacttaatacgactcactataggctagcctcgagaattcac |
| | gcgtgccgccaccatgtacagaatgcagctgctgctgctcattgccctgtctctggccct |
| | ggtcaccaattctgaggtccagctgcttgagagtggtggtggactggttcagcctggtgg |
| | cagcctgagactgtcttgtgctgcctctggcttcaccttcagccactatatcatgatgtg |
| | ggtcagacaggcccctggcaaaggcctggaatgggtgtcaggcatctacagcagtggtgg |
| | catcacagtgtatgctgactctgtgaagggcagattcaccatcagcagagacaacagcaa |
| | gaacaccctgtacctgcagatgaactccctgagagctgaggacacagcagtgtactactg |
| | tgcctatagaagaattggggtgcccagaagggatgagtttgacatctggggccagggcac |
| | catggttacagtgtcctctgccagcacaaagggcccctctgtttttccactggctcccag |
| | cagcaagagcaccagtggtggaacagctgccctgggctgtctggtcaaggattacttccc |
| | tgagcctgtgactgtgtcctggaactctggggctctgacttctggggtgcacacctttcc |
| | agctgtgctgcagtcctctggcctgtactctctgtcctctgtggtcacagtgcctagctc |
| | tagcctgggcacacagacctacatctgcaatgtgaaccacaagcctagcaacaccaaggt |
| | ggacaagagagtggaacccaagagctgtgacaagacccacacctgtcctccatgtcctgc |
| | tccagaactgcttggaggcccttctgtgttcctgtttcctccaaagcctaaggacaccct |
| | gatgatcagcagaacccctgaagtgacctgtgtggtggttgatgtgtcccatgaggaccc |
| | agaagtgaagttcaattggtatgtggatggggttgaagtgcacaatgccaagaccaagcc |
| | tagagaggaacagtacaacagcacctacagagtggtttctgtgctgacagtgctgcacca |
| | ggactggctgaatggcaaagagtacaagtgcaaggtgtccaacaaggccctgcctgctcc |
| | tattgagaaaaccatctccaaggccaagggccagccaagagaaccccaggtttacaccct |
| | gccacctagcagagaagagatgaccaagaaccaggtgtccctgacctgcctggttaaggg |
| | cttctacccctctgacattgctgtggaatgggagagcaatggccagcctgaaaacaacta |
| | caagacaacccctcctgtgctggactctgatggctcattcttcctgtacagcaagctgac |
| | tgtggacaagtccagatggcagcagggaaatgtgttcagctgctctgtgatgcatgaggc |
| | cctgcacaaccactacacccagaaaagtctgtctctgtcccctggcagaaagagaagagg |
| | ctctggagaaggcagaggctccctgctgacatgtggggatgttgaagagaatcctgggcc |
| | tatgtataggatgcaactgctcctcctgattgctctgagcctggctcttgtgaccaactc |
| | tgacatccagatgacacagagcccctccacactgtctgcatctgtgggagacagagtgac |
| | catcacctgtagagccagccagtctatctctagctggctggcctggtatcagcaaaagcc |
| | tggcaaggcccctaagctgctgatctacaaggccagcacacttgagtcaggggtgccctc |
| | cagattttctggctctggatctggcacagagttcaccctgaccatcagctccctgcagcc |
| | agatgactttgccacctactactgccagcagtacaatacctactggacctttggccaggg |
| | aacaaaggtggaaatcaagagaacagtggctgccccatctgtgttcatcttcccaccatc |
| | tgatgaacagctgaagtctggcactgcctctgttgtgtgcctgctgaacaacttttaccc |
| | cagagaagccaaggtgcagtggaaagtggataatgccctgcagtctggcaatagccaaga |
| | atctgtgacagagcaggactccaaggattccacctacagcctgagcagcaccctgacact |
| | gagcaaggctgactatgagaagcacaaagtgtatgcctgtgaagtgacacaccagggact |
| | gagcagcccagtgaccaagagcttcaacaggggagagtgctgataagtcgacccgggcgg |
| | cctcgaggacggggtgaactacgcctgaggatccgatctttttccctctgccaaaaatta |
| | tggggacatcatgaagccccttgagcatctgacttctggctaataaaggaaatttatttt |
| | cattgcaatagtgtgttggaattttttgtgtctctca |
| ApoE.hAAT.LANv2.T2A | ggctcagaggcacacaggagtttctgggctcaccctgcccccttccaacccctcagttcc |
| (ApoE.hAAT.L02) | catcctccagcagctgtttgtgtgctgcctctgaagtccacactgaacaaacttcagcct |
| SEQ ID NO: 439 | actcatgtccctaaaatgggcaaacattgcaagcagcaaacagcaaacacacagccctcc |
| | ctgcctgctgaccttggagctggggcagaggtcagagacctctctgggcccatgccacct |
| | ccaacatccactcgaccccttggaatttcggtggagaggagcagaggttgtcctggcgtg |
| | gtttaggtagtgtgagaggggtacccggggatcttgctaccagtggaacagccactaagg |
| | attctgcagtgagagcagagggccagctaagtggtactctcccagagactgtctgactca |
| | cgccaccccctccaccttggacacaggacgctgtggtttctgagccaggtacaatgactc |
| | ctttcggtaagtgcagtggaagctgtacactgcccaggcaaagcgtccgggcagcgtagg |
| | cgggcgactcagatcccagccagtggacttagcccctgtttgctcctccgataactgggg |
| | tgaccttggttaatattcaccagcagcctcccccgttgcccctctggatccactgcttaa |
| | atacggacgaggacagggccctgtctcctcagcttcaggcaccaccactgacctgggaca |
| | gtcaggtaagtatcaaggttacaagacaggtttaaggagaccaatagaaactgggcttgt |
| | cgagacagagaagactcttgcgtttctgataggcacctattggtcttactgacatccact |
| | ttgcctttctctccacaggttcgaattcgccgccaccatgtacagaatgcagctgctgct |
| | gctcattgccctgtctctggccctggtcaccaattctgaggtccagctgcttgagagtgg |
| | tggtggactggttcagcctggtggcagcctgagactgtcttgtgctgcctctggcttcac |
| | cttcagccactatatcatgatgtgggtcagacaggcccctggcaaaggcctggaatgggt |
| | gtcaggcatctacagcagtggtggcatcacagtgtatgctgactctgtgaagggcagatt |
| | caccatcagcagagacaacagcaagaacaccctgtacctgcagatgaactccctgagagc |
| | tgaggacacagcagtgtactactgtgcctatagaagaattggggtgcccagaagggatga |
| | gtttgacatctggggccagggcaccatggttacagtgtcctctgccagcacaaagggccc |
| | ctctgtttttccactggctcccagcagcaagagcaccagtggtggaacagctgccctggg |
| | ctgtctggtcaaggattacttccctgagcctgtgactgtgtcctggaactctggggctct |
| | gacttctggggtgcacacctttccagctgtgctgcagtcctctggcctgtactctctgtc |
| | ctctgtggtcacagtgcctagctctagcctgggcacacagacctacatctgcaatgtgaa |
| | ccacaagcctagcaacaccaaggtggacaagagagtggaacccaagagctgtgacaagac |
| | ccacacctgtcctccatgtcctgctccagaactgcttggaggcccttctgtgttcctgtt |
| | tcctccaaagcctaaggacaccctgatgatcagcagaacccctgaagtgacctgtgtggt |
| | ggttgatgtgtcccatgaggacccagaagtgaagttcaattggtatgtggatggggttga |
| | agtgcacaatgccaagaccaagcctagagaggaacagtacaacagcacctacagagtggt |
| | ttctgtgctgacagtgctgcaccaggactggctgaatggcaaagagtacaagtgcaaggt |
| | gtccaacaaggccctgcctgctcctattgagaaaaccatctccaaggccaagggccagcc |
| | aagagaaccccaggtttacaccctgccacctagcagagaagagatgaccaagaaccaggt |
| | gtccctgacctgcctggttaagggcttctacccctctgacattgctgtggaatgggagag |
| | caatggccagcctgaaaacaactacaagacaacccctcctgtgctggactctgatggctc |
| | attcttcctgtacagcaagctgactgtggacaagtccagatggcagcagggaaatgtgtt |
| | cagctgctctgtgatgcatgaggccctgcacaaccactacacccagaaaagtctgtctct |
| | gtcccctggcagaaagagaagaggctctggagaaggcagaggctccctgctgacatgtgg |
| | ggatgttgaagagaatcctgggcctatgtataggatgcaactgctcctcctgattgctct |
| | gagcctggctcttgtgaccaactctgacatccagatgacacagagcccctccacactgtc |
| | tgcatctgtgggagacagagtgaccatcacctgtagagccagccagtctatctctagctg |
| | gctggcctggtatcagcaaaagcctggcaaggcccctaagctgctgatctacaaggccag |
| | cacacttgagtcaggggtgccctccagattttctggctctggatctggcacagagttcac |
| | cctgaccatcagctccctgcagccagatgactttgccacctactactgccagcagtacaa |
| | tacctactggacctttggccagggaacaaaggtggaaatcaagagaacagtggctgcccc |
| | atctgtgttcatcttcccaccatctgatgaacagctgaagtctggcactgcctctgttgt |
| | gtgcctgctgaacaacttttaccccagagaagccaaggtgcagtggaaagtggataatgc |
| | cctgcagtctggcaatagccaagaatctgtgacagagcaggactccaaggattccaccta |
| | cagcctgagcagcaccctgacactgagcaaggctgactatgagaagcacaaagtgtatgc |
| | ctgtgaagtgacacaccagggactgagcagcccagtgaccaagagcttcaacaggggaga |
| | gtgctgataactcgaggacggggtgaactacgcctgaggatccgatctttttccctctgc |
| | caaaaattatggggacatcatgaagccccttgagcatctgacttctggctaataaaggaa |
| | atttattttcattgcaatagtgtgttggaattttttgtgtctctca |
| LSPX1.LANv2.T2A | aggttaatttttaaaaagcagtcaaaagtccaagtggcccttggcagcatttactctctc |
| (LSPX.L02) | tgtttgctctggttaataatctcaggagcacaaacattccagatccaggttaatttttaa |
| SEQ ID NO: 440 | aaagcagtcaaaagtccaagtggcccttggcagcatttactctctctgtttgctctggtt |
| | aataatctcaggagcacaaacattccagatccggcgcgccagggctggaagctacctttg |
| | tctagaaggctcagaggcacacaggagtttctgggctcaccctgcccccttccaacccct |
| | cagttcccatcctccagcagctgtttgtgtgctgcctctgaagtccacactgaacaaact |
| | tcagcctactcatgtccctaaaatgggcaaacattgcaagcagcaaacagcaaacacaca |
| | gccctccctgcctgctgaccttggagctggggcagaggtcagagacctctctgggcccat |
| | gccacctccaacatccactcgaccccttggaatttcggtggagaggagcagaggttgtcc |
| | tggcgtggtttaggtagtgtgagaggggtacccggggatcttgctaccagtggaacagcc |
| | actaaggattctgcagtgagagcagagggccagctaagtggtactctcccagagactgtc |
| | tgactcacgccaccccctccaccttggacacaggacgctgtggtttctgagccaggtaca |
| | atgactcctttcggtaagtgcagtggaagctgtacactgcccaggcaaagcgtccgggca |
| | gcgtaggcgggcgactcagatcccagccagtggacttagcccctgtttgctcctccgata |
| | actggggtgaccttggttaatattcaccagcagcctcccccgttgcccctctggatccac |
| | tgcttaaatacggacgaggacagggccctgtctcctcagcttcaggcaccaccactgacc |
| | tgggacagtcaggtaagtatcaaggttacaagacaggtttaaggagaccaatagaaactg |
| | ggcttgtcgagacagagaagactcttgcgtttctgataggcacctattggtcttactgac |
| | atccactttgcctttctctccacaggttgaattcgccgccaccatgtacagaatgcagct |
| | gctgctgctcattgccctgtctctggccctggtcaccaattctgaggtccagctgcttga |
| | gagtggtggtggactggttcagcctggtggcagcctgagactgtcttgtgctgcctctgg |
| | cttcaccttcagccactatatcatgatgtgggtcagacaggcccctggcaaaggcctgga |
| | atgggtgtcaggcatctacagcagtggtggcatcacagtgtatgctgactctgtgaaggg |
| | cagattcaccatcagcagagacaacagcaagaacaccctgtacctgcagatgaactccct |
| | gagagctgaggacacagcagtgtactactgtgcctatagaagaattggggtgcccagaag |
| | ggatgagtttgacatctggggccagggcaccatggttacagtgtcctctgccagcacaaa |
| | gggcccctctgtttttccactggctcccagcagcaagagcaccagtggtggaacagctgc |
| | cctgggctgtctggtcaaggattacttccctgagcctgtgactgtgtcctggaactctgg |
| | ggctctgacttctggggtgcacacctttccagctgtgctgcagtcctctggcctgtactc |
| | tctgtcctctgtggtcacagtgcctagctctagcctgggcacacagacctacatctgcaa |
| | tgtgaaccacaagcctagcaacaccaaggtggacaagagagtggaacccaagagctgtga |
| | caagacccacacctgtcctccatgtcctgctccagaactgcttggaggcccttctgtgtt |
| | cctgtttcctccaaagcctaaggacaccctgatgatcagcagaacccctgaagtgacctg |
| | tgtggtggttgatgtgtcccatgaggacccagaagtgaagttcaattggtatgtggatgg |
| | ggttgaagtgcacaatgccaagaccaagcctagagaggaacagtacaacagcacctacag |
| | agtggtttctgtgctgacagtgctgcaccaggactggctgaatggcaaagagtacaagtg |
| | caaggtgtccaacaaggccctgcctgctcctattgagaaaaccatctccaaggccaaggg |
| | ccagccaagagaaccccaggtttacaccctgccacctagcagagaagagatgaccaagaa |
| | ccaggtgtccctgacctgcctggttaagggcttctacccctctgacattgctgtggaatg |
| | ggagagcaatggccagcctgaaaacaactacaagacaacccctcctgtgctggactctga |
| | tggctcattcttcctgtacagcaagctgactgtggacaagtccagatggcagcagggaaa |
| | tgtgttcagctgctctgtgatgcatgaggccctgcacaaccactacacccagaaaagtct |
| | gtctctgtcccctggcagaaagagaagaggctctggagaaggcagaggctccctgctgac |
| | atgtggggatgttgaagagaatcctgggcctatgtataggatgcaactgctcctcctgat |
| | tgctctgagcctggctcttgtgaccaactctgacatccagatgacacagagcccctccac |
| | actgtctgcatctgtgggagacagagtgaccatcacctgtagagccagccagtctatctc |
| | tagctggctggcctggtatcagcaaaagcctggcaaggcccctaagctgctgatctacaa |
| | ggccagcacacttgagtcaggggtgccctccagattttctggctctggatctggcacaga |
| | gttcaccctgaccatcagctccctgcagccagatgactttgccacctactactgccagca |
| | gtacaatacctactggacctttggccagggaacaaaggtggaaatcaagagaacagtggc |
| | tgccccatctgtgttcatcttcccaccatctgatgaacagctgaagtctggcactgcctc |
| | tgttgtgtgcctgctgaacaacttttaccccagagaagccaaggtgcagtggaaagtgga |
| | taatgccctgcagtctggcaatagccaagaatctgtgacagagcaggactccaaggattc |
| | cacctacagcctgagcagcaccctgacactgagcaaggctgactatgagaagcacaaagt |
| | gtatgcctgtgaagtgacacaccagggactgagcagcccagtgaccaagagcttcaacag |
| | gggagagtgctgataactcgaggacggggtgaactacgcctgaggatccgatctttttcc |
| | ctctgccaaaaattatggggacatcatgaagccccttgagcatctgacttctggctaata |
| | aaggaaatttattttcattgcaatagtgtgttggaattttttgtgtctctca |
| LSPX2.LANv2.T2A | aggctcagaggcacacaggagtttctgggctcaccctgcccccttccaacccctcagttc |
| (LSPX2.L02) | ccatcctccagcagctgtttgtgtgctgcctctgaagtccacactgaacaaacttcagcc |
| SEQ ID NO: 441 | tactcatgtccctaaaatgggcaaacattgcaagcagcaaacagcaaacacacagccctc |
| SEQ ID NO: | cctgcctgctgaccttggagctggggcagaggtcagagacctctctgggcccatgccacc |
| | tccaacatccactcgaccccttggaatttcggtggagaggagcagaggttgtcctggcgt |
| | ggtttaggtagtgtgagagggtctagaaggctcagaggcacacaggagtttctgggctca |
| | ccctgcccccttccaacccctcagttcccatcctccagcagctgtttgtgtgctgcctct |
| | gaagtccacactgaacaaacttcagcctactcatgtccctaaaatgggcaaacattgcaa |
| | gcagcaaacagcaaacacacagccctccctgcctgctgaccttggagctggggcagaggt |
| | cagagacctctctgggcccatgccacctccaacatccactcgaccccttggaatttcggt |
| | ggagaggagcagaggttgtcctggcgtggtttaggtagtgtgagaggggtacccggggat |
| | cttgctaccagtggaacagccactaaggattctgcagtgagagcagagggccagctaagt |
| | ggtactctcccagagactgtctgactcacgccaccccctccaccttggacacaggacgct |
| | gtggtttctgagccaggtacaatgactcctttcggtaagtgcagtggaagctgtacactg |
| | cccaggcaaagcgtccgggcagcgtaggcgggcgactcagatcccagccagtggacttag |
| | cccctgtttgctcctccgataactggggtgaccttggttaatattcaccagcagcctccc |
| | ccgttgcccctctggatccactgcttaaatacggacgaggacagggccctgtctcctcag |
| | cttcaggcaccaccactgacctgggacagtcaggtaagtatcaaggttacaagacaggtt |
| | taaggagaccaatagaaactgggcttgtcgagacagagaagactcttgcgtttctgatag |
| | gcacctattggtcttactgacatccactttgcctttctctccacaggttgaattcgccgc |
| | caccatgtacagaatgcagctgctgctgctcattgccctgtctctggccctggtcaccaa |
| | ttctgaggtccagctgcttgagagtggtggtggactggttcagcctggtggcagcctgag |
| | actgtcttgtgctgcctctggcttcaccttcagccactatatcatgatgtgggtcagaca |
| | ggcccctggcaaaggcctggaatgggtgtcaggcatctacagcagtggtggcatcacagt |
| | gtatgctgactctgtgaagggcagattcaccatcagcagagacaacagcaagaacaccct |
| | gtacctgcagatgaactccctgagagctgaggacacagcagtgtactactgtgcctatag |
| | aagaattggggtgcccagaagggatgagtttgacatctggggccagggcaccatggttac |
| | agtgtcctctgccagcacaaagggcccctctgtttttccactggctcccagcagcaagag |
| | caccagtggtggaacagctgccctgggctgtctggtcaaggattacttccctgagcctgt |
| | gactgtgtcctggaactctggggctctgacttctggggtgcacacctttccagctgtgct |
| | gcagtcctctggcctgtactctctgtcctctgtggtcacagtgcctagctctagcctggg |
| | cacacagacctacatctgcaatgtgaaccacaagcctagcaacaccaaggtggacaagag |
| | agtggaacccaagagctgtgacaagacccacacctgtcctccatgtcctgctccagaact |
| | gcttggaggcccttctgtgttcctgtttcctccaaagcctaaggacaccctgatgatcag |
| | cagaacccctgaagtgacctgtgtggtggttgatgtgtcccatgaggacccagaagtgaa |
| | gttcaattggtatgtggatggggttgaagtgcacaatgccaagaccaagcctagagagga |
| | acagtacaacagcacctacagagtggtttctgtgctgacagtgctgcaccaggactggct |
| | gaatggcaaagagtacaagtgcaaggtgtccaacaaggccctgcctgctcctattgagaa |
| | aaccatctccaaggccaagggccagccaagagaaccccaggtttacaccctgccacctag |
| | cagagaagagatgaccaagaaccaggtgtccctgacctgcctggttaagggcttctaccc |
| | ctctgacattgctgtggaatgggagagcaatggccagcctgaaaacaactacaagacaac |
| | ccctcctgtgctggactctgatggctcattcttcctgtacagcaagctgactgtggacaa |
| | gtccagatggcagcagggaaatgtgttcagctgctctgtgatgcatgaggccctgcacaa |
| | ccactacacccagaaaagtctgtctctgtcccctggcagaaagagaagaggctctggaga |
| | aggcagaggctccctgctgacatgtggggatgttgaagagaatcctgggcctatgtatag |
| | gatgcaactgctcctcctgattgctctgagcctggctcttgtgaccaactctgacatcca |
| | gatgacacagagcccctccacactgtctgcatctgtgggagacagagtgaccatcacctg |
| | tagagccagccagtctatctctagctggctggcctggtatcagcaaaagcctggcaaggc |
| | ccctaagctgctgatctacaaggccagcacacttgagtcaggggtgccctccagattttc |
| | tggctctggatctggcacagagttcaccctgaccatcagctccctgcagccagatgactt |
| | tgccacctactactgccagcagtacaatacctactggacctttggccagggaacaaaggt |
| | ggaaatcaagagaacagtggctgccccatctgtgttcatcttcccaccatctgatgaaca |
| | gctgaagtctggcactgcctctgttgtgtgcctgctgaacaacttttaccccagagaagc |
| | caaggtgcagtggaaagtggataatgccctgcagtctggcaatagccaagaatctgtgac |
| | agagcaggactccaaggattccacctacagcctgagcagcaccctgacactgagcaaggc |
| | tgactatgagaagcacaaagtgtatgcctgtgaagtgacacaccagggactgagcagccc |
| | agtgaccaagagcttcaacaggggagagtgctgataactcgaggacggggtgaactacgc |
| | ctgaggatccgatctttttccctctgccaaaaattatggggacatcatgaagccccttga |
| | gcatctgacttctggctaataaaggaaatttattttcattgcaatagtgtgttggaattt |
| | tttgtgtctctca |
| LTP1.LANv2.T2A | aggttaatttttaaaaagcagtcaaaagtccaagtggcccttggcagcatttactctctc |
| (LTP1.L02) | tgtttgctctggttaataatctcaggagcacaaacattccagatccaggttaatttttaa |
| SEQ ID NO: 442 | aaagcagtcaaaagtccaagtggcccttggcagcatttactctctctgtttgctctggtt |
| | aataatctcaggagcacaaacattccagatccggcgcgccagggctggaagctacctttg |
| | acatcatttcctctgcgaatgcatgtataatttctacagaacctattagaaaggatcacc |
| | cagcctctgcttttgtacaactttcccttaaaaaactgccaattccactgctgtttggcc |
| | caatagtgagaactttttcctgctgcctcttggtgcttttgcctatggcccctattctgc |
| | ctgctgaagacactcttgccagcatggacttaaacccctccagctctgacaatcctcttt |
| | ctcttttgttttacatgaagggtctggcagccaaagcaatcactcaaagttcaaacctta |
| | tcattttttgctttgttcctcttggccttggttttgtacatcagctttgaaaataccatc |
| | ccagggttaatgctggggttaatttataactaagagtgctctagttttgcaatacaggac |
| | atgctataaaaatggaaagatgttgctttctgagaggatcttgctaccagtggaacagcc |
| | actaaggattctgcagtgagagcagagggccagctaagtggtactctcccagagactgtc |
| | tgactcacgccaccccctccaccttggacacaggacgctgtggtttctgagccaggtaca |
| | gtgactcctttcggtaagtgcagtggaagctgtacactgcccaggcaaagcgtccgggca |
| | gcgtaggcgggcgactcagatcccagccagtggacttagcccctgtttgctcctccgata |
| | actggggtgaccttggttaatattcaccagcagcctcccccgttgcccctctggatccac |
| | tgcttaaatacggacgaggacagggccctgtctcctcagcttcaggcaccaccactgacc |
| | tgggacagtcaggtaagtatcaaggttacaagacaggtttaaggagaccaatagaaactg |
| | ggcttgtcgagacagagaagactcttgcgtttctgataggcacctattggtcttactgac |
| | atccactttgcctttctctccacaggttgaattcgccgccaccatgtacagaatgcagct |
| | gctgctgctcattgccctgtctctggccctggtcaccaattctgaggtccagctgcttga |
| | gagtggtggtggactggttcagcctggtggcagcctgagactgtcttgtgctgcctctgg |
| | cttcaccttcagccactatatcatgatgtgggtcagacaggcccctggcaaaggcctgga |
| | atgggtgtcaggcatctacagcagtggtggcatcacagtgtatgctgactctgtgaaggg |
| | cagattcaccatcagcagagacaacagcaagaacaccctgtacctgcagatgaactccct |
| | gagagctgaggacacagcagtgtactactgtgcctatagaagaattggggtgcccagaag |
| | ggatgagtttgacatctggggccagggcaccatggttacagtgtcctctgccagcacaaa |
| | gggcccctctgtttttccactggctcccagcagcaagagcaccagtggtggaacagctgc |
| | cctgggctgtctggtcaaggattacttccctgagcctgtgactgtgtcctggaactctgg |
| | ggctctgacttctggggtgcacacctttccagctgtgctgcagtcctctggcctgtactc |
| | tctgtcctctgtggtcacagtgcctagctctagcctgggcacacagacctacatctgcaa |
| | tgtgaaccacaagcctagcaacaccaaggtggacaagagagtggaacccaagagctgtga |
| | caagacccacacctgtcctccatgtcctgctccagaactgcttggaggcccttctgtgtt |
| | cctgtttcctccaaagcctaaggacaccctgatgatcagcagaacccctgaagtgacctg |
| | tgtggtggttgatgtgtcccatgaggacccagaagtgaagttcaattggtatgtggatgg |
| | ggttgaagtgcacaatgccaagaccaagcctagagaggaacagtacaacagcacctacag |
| | agtggtttctgtgctgacagtgctgcaccaggactggctgaatggcaaagagtacaagtg |
| | caaggtgtccaacaaggccctgcctgctcctattgagaaaaccatctccaaggccaaggg |
| | ccagccaagagaaccccaggtttacaccctgccacctagcagagaagagatgaccaagaa |
| | ccaggtgtccctgacctgcctggttaagggcttctacccctctgacattgctgtggaatg |
| | ggagagcaatggccagcctgaaaacaactacaagacaacccctcctgtgctggactctga |
| | tggctcattcttcctgtacagcaagctgactgtggacaagtccagatggcagcagggaaa |
| | tgtgttcagctgctctgtgatgcatgaggccctgcacaaccactacacccagaaaagtct |
| | gtctctgtcccctggcagaaagagaagaggctctggagaaggcagaggctccctgctgac |
| | atgtggggatgttgaagagaatcctgggcctatgtataggatgcaactgctcctcctgat |
| | tgctctgagcctggctcttgtgaccaactctgacatccagatgacacagagcccctccac |
| | actgtctgcatctgtgggagacagagtgaccatcacctgtagagccagccagtctatctc |
| | tagctggctggcctggtatcagcaaaagcctggcaaggcccctaagctgctgatctacaa |
| | ggccagcacacttgagtcaggggtgccctccagattttctggctctggatctggcacaga |
| | gttcaccctgaccatcagctccctgcagccagatgactttgccacctactactgccagca |
| | gtacaatacctactggacctttggccagggaacaaaggtggaaatcaagagaacagtggc |
| | tgccccatctgtgttcatcttcccaccatctgatgaacagctgaagtctggcactgcctc |
| | tgttgtgtgcctgctgaacaacttttaccccagagaagccaaggtgcagtggaaagtgga |
| | taatgccctgcagtctggcaatagccaagaatctgtgacagagcaggactccaaggattc |
| | cacctacagcctgagcagcaccctgacactgagcaaggctgactatgagaagcacaaagt |
| | gtatgcctgtgaagtgacacaccagggactgagcagcccagtgaccaagagcttcaacag |
| | gggagagtgctgataactcgaggacggggtgaactacgcctgaggatccgatctttttcc |
| | ctctgccaaaaattatggggacatcatgaagccccttgagcatctgacttctggctaata |
| | aaggaaatttattttcattgcaatagtgtgttggaattttttgtgtctctca |
| LMTP6.LANv2.T2A | aggctcagaggcacacaggagtttctgggctcaccctgcccccttccaacccctcagttc |
| (LMTP6.L02) | ccatcctccagcagctgtttgtgtgctgcctctgaagtccacactgaacaaacttcagcc |
| SEQ ID NO: 443 | tactcatgtccctaaaatgggcaaacattgcaagcagcaaacagcaaacacacagccctc |
| | cctgcctgctgaccttggagctggggcagaggtcagagacctctctgggcccatgccacc |
| | tccaacatccactcgaccccttggaatttcggtggagaggagcagaggttgtcctggcgt |
| | ggtttaggtagtgtgagagggccactacgggtttaggctgcccatgtaaggaggcaaggc |
| | ctggggacacccgagatgcctggttataattaacccagacatgtggctgccccccccccc |
| | cccaacacctgctgcctctaaaaataaccctgtccctggtggatcccactacgggtttag |
| | gctgcccatgtaaggaggcaaggcctggggacacccgagatgcctggttataattaaccc |
| | agacatgtggctgccccccccccccccaacacctgctgcctctaaaaataaccctgtccc |
| | tggtggatcccactacgggtttaggctgcccatgtaaggaggcaaggcctggggacaccc |
| | gagatgcctggttataattaacccagacatgtggctgccccccccccccccaacacctgc |
| | tgcctctaaaaataaccctgtccctggtggatcccctgcatgcgaagatcttcgaacaag |
| | gctgtgggggactgagggcaggctgtaacaggcttgggggccagggcttatacgtgcctg |
| | ggactcccaaagtattactgttccatgttcccggcgaagggccagctgtcccccgccagc |
| | tagactcagcacttagtttaggaaccagtgagcaagtcagcccttggggcagcccataca |
| | aggccatggggctgggcaagctgcacgcctgggtccggggtgggcacggtgcccgggcaa |
| | cgagctgaaagctcatctgctctcaggggcccctccctggggacagcccctcctggctag |
| | tcacaccctgtaggctcctctatataacccaggggcacaggggctgccctcattctacca |
| | ccacctccacagcacagacagacactcaggagccagccagcgtcgagatcttgctaccag |
| | tggaacagccactaaggattctgcagtgagagcagagggccagctaagtggtactctccc |
| | agagactgtctgactcacgccaccccctccaccttggacacaggacgctgtggtttctga |
| | gccaggtacagtgactcctttcggtaagtgcagtggaagctgtacactgcccaggcaaag |
| | cgtccgggcagcgtaggcgggcgactcagatcccagccagtggacttagcccctgtttgc |
| | tcctccgataactggggtgaccttggttaatattcaccagcagcctcccccgttgcccct |
| | ctggatccactgcttaaatacggacgaggacagggccctgtctcctcagcttcaggcacc |
| | accactgacctgggacagtcaggtaagtatcaaggttacaagacaggtttaaggagacca |
| | atagaaactgggcttgtcgagacagagaagactcttgcgtttctgataggcacctattgg |
| | tcttactgacatccactttgcctttctctccacaggttcgaattcgccgccaccatgtac |
| | agaatgcagctgctgctgctcattgccctgtctctggccctggtcaccaattctgaggtc |
| | cagctgcttgagagtggtggtggactggttcagcctggtggcagcctgagactgtcttgt |
| | gctgcctctggcttcaccttcagccactatatcatgatgtgggtcagacaggcccctggc |
| | aaaggcctggaatgggtgtcaggcatctacagcagtggtggcatcacagtgtatgctgac |
| | tctgtgaagggcagattcaccatcagcagagacaacagcaagaacaccctgtacctgcag |
| | atgaactccctgagagctgaggacacagcagtgtactactgtgcctatagaagaattggg |
| | gtgcccagaagggatgagtttgacatctggggccagggcaccatggttacagtgtcctct |
| | gccagcacaaagggcccctctgtttttccactggctcccagcagcaagagcaccagtggt |
| | ggaacagctgccctgggctgtctggtcaaggattacttccctgagcctgtgactgtgtcc |
| | tggaactctggggctctgacttctggggtgcacacctttccagctgtgctgcagtcctct |
| | ggcctgtactctctgtcctctgtggtcacagtgcctagctctagcctgggcacacagacc |
| | tacatctgcaatgtgaaccacaagcctagcaacaccaaggtggacaagagagtggaaccc |
| | aagagctgtgacaagacccacacctgtcctccatgtcctgctccagaactgcttggaggc |
| | ccttctgtgttcctgtttcctccaaagcctaaggacaccctgatgatcagcagaacccct |
| | gaagtgacctgtgtggtggttgatgtgtcccatgaggacccagaagtgaagttcaattgg |
| | tatgtggatggggttgaagtgcacaatgccaagaccaagcctagagaggaacagtacaac |
| | agcacctacagagtggtttctgtgctgacagtgctgcaccaggactggctgaatggcaaa |
| | gagtacaagtgcaaggtgtccaacaaggccctgcctgctcctattgagaaaaccatctcc |
| | aaggccaagggccagccaagagaaccccaggtttacaccctgccacctagcagagaagag |
| | atgaccaagaaccaggtgtccctgacctgcctggttaagggcttctacccctctgacatt |
| | gctgtggaatgggagagcaatggccagcctgaaaacaactacaagacaacccctcctgtg |
| | ctggactctgatggctcattcttcctgtacagcaagctgactgtggacaagtccagatgg |
| | cagcagggaaatgtgttcagctgctctgtgatgcatgaggccctgcacaaccactacacc |
| | cagaaaagtctgtctctgtcccctggcagaaagagaagaggctctggagaaggcagaggc |
| | tccctgctgacatgtggggatgttgaagagaatcctgggcctatgtataggatgcaactg |
| | ctcctcctgattgctctgagcctggctcttgtgaccaactctgacatccagatgacacag |
| | agcccctccacactgtctgcatctgtgggagacagagtgaccatcacctgtagagccagc |
| | cagtctatctctagctggctggcctggtatcagcaaaagcctggcaaggcccctaagctg |
| | ctgatctacaaggccagcacacttgagtcaggggtgccctccagattttctggctctgga |
| | tctggcacagagttcaccctgaccatcagctccctgcagccagatgactttgccacctac |
| | tactgccagcagtacaatacctactggacctttggccagggaacaaaggtggaaatcaag |
| | agaacagtggctgccccatctgtgttcatcttcccaccatctgatgaacagctgaagtct |
| | ggcactgcctctgttgtgtgcctgctgaacaacttttaccccagagaagccaaggtgcag |
| | tggaaagtggataatgccctgcagtctggcaatagccaagaatctgtgacagagcaggac |
| | tccaaggattccacctacagcctgagcagcaccctgacactgagcaaggctgactatgag |
| | aagcacaaagtgtatgcctgtgaagtgacacaccagggactgagcagcccagtgaccaag |
| | agcttcaacaggggagagtgctgataactcgaggacggggtgaactacgcctgaggatcc |
| | gatctttttccctctgccaaaaattatggggacatcatgaagccccttgagcatctgact |
| | tctggctaataaaggaaatttattttcattgcaatagtgtgttggaattttttgtgtctc |
| | tca |

[1370] HEK293 cells were plated at a density of 7.5×10⁵ cells/well in each well of a standard 6-well dish containing Dulbecco's modified eagle medium (DMEM) supplied with 10% fetal bovine serum (FBS). The next day, cells were transfected with CAG.L01 (SEQ ID NO: 435), CAG.L02 (SEQ ID NO: 437), and CAG.L03 (SEQ ID NO: 436) AAV constructs using Lifpofectamine 2000 (Invitrogen) according the manufacturer's protocol). Non-transfected cells were used as negative control. Cell culture medium was changed 24 hours post-transfection to opti-mem I reduced serum media (2 mL/well). Cell culture supernatant was harvested at 48 hours post-transfection, and cell lysates were harvested with RIPA buffer (Pierce) supplemented with EDTA-free protease inhibitor tablets (Pierce). Supernatant and lysates samples were stored at −80 C.

[1371] Proteins from supernatant or cell lysate samples were separated via the NuPAGE electrophoresis system (Thermo Fisher Scientific). For samples derived from cell lysates, 40 μg of protein was loaded unless indicated otherwise. Purified human IgG or Lanadelumab IgG (produced by Genscript) were used as loading controls (50-100 ng). Samples were heated with LDS sample buffer and NuPAGE reducing agent at 70 C for 10 minutes and then loaded into NuPAGE 4-12% Bis-Tris protein gels. Separated proteins were transferred to PVDF membranes using the iBlot2 dry blotting system according to manufacturer's instructions (P3 default setting was used for the protein transfer). Membranes were immediately washed in phosphate buffer saline with 0.1% v/v Tween-20 (PBST). Membranes were then incubated in blocking solution containing PBST and 1% Clear Milk Blocking Buffer (Thermo Scientific) for 1 hour at room temperature. Membranes were then incubated in fresh blocking solution supplemented with goat anti-human kappa light chain-HRP antibody (Bethyl Laboratories; 1:2000 dilution) and goat anti-human IgG Fc-HRP antibody (1:2000 dilution). Following antibody incubation, membranes were washed three times in PB ST for 5 minutes per wash. Finally, membranes were incubated in SuperSignal West Pico PLUS chemiluminescent substrate for 5 minutes and imaged on the BioRad Universal Hood II gel doc system for detection of horseradish peroxidase (HRP) signal.

### Results

[1372] Expression analysis of reporter transgene (eGFP) following transfection of different plasmid quantities (4 μg-nontransfected) showed a dose dependent increase in eGFP levels (FIG. 24B). Protein expression analysis of lanadelumab in the cell lysate (FIG. 24C) and in the cell supernatant (FIG. 24D) showed dose-dependent levels of lanadelumab in cell lysates and supernatant. Transfection with the construct containing the L02 transgene (SEQ ID NO: 286, CAG.L02 (SEQ ID NO: 437)), a codon-optimized and depleted of CpG dinucleotide sequences construction, resulted in higher expression levels compared to L01 transgene (SEQ ID NO: 141, CAG.L01 SEQ ID NO: 435). Transfection of CAG.L02 (SEQ ID NO: 437) and CAG.L03 (SEQ ID NO: 436) resulted in similar expression levels.

### 6.51 Example 51: Serum Expression of Lanadelumab in Mice

### Methods

[1373] A. Mouse experiments were performed with either AAV8 or AAV9 containing an AAV construct (as depicted in FIG. 24A) comprising the L01 sequence (SEQ ID NO: 141), which contains the Furin and F2A sequence (SEQ ID NO: 231). AAV8 and AAV9 vectors (n=5 mice per group; 2e11 genome copies (gc)) were administered to immunocompromised NSG mice via either intravenous (IV) or intramuscular (IM) routes. IV administrations were into the tail vein and IM administrations were bilateral into the gastrocnemius muscles. Mice injected with vehicle were included as controls. Seven weeks post administration mice were sacrificed and serum human antibody levels were determined by enzyme-linked immunosorbent assay (ELISA).

[1374] Lanadelumab levels in NSG mouse serum was assessed by ELISA. Briefly, mouse serum was obtained before treatment and at 1, 3, 5 and 7 weeks post in vivo gene transfection and stored at −80° C. 96-well plate was coated with 1 μg/ml human IgG-Fc fragment antibody (Bethyl, Montgomery, Tex.) in carbonate bicarbonate buffer (0.05M, pH 9.6, Sigma-Aldrich, St. Louis, Mo.) and incubated overnight at 4° C. After washing with Tween 20 washing buffer (PBST, 0.05%, Alfa Aesar, Haverhill, Mass.), plate was incubated with blocking buffer (3% BSA in PBS, ThermoFisher Scientific, Waltham, Mass.) for 1 h at 37° C. followed by washing. Mouse serum samples diluted in sample dilution buffer (0.1% Tween 20 and 3% BSA in PBS) was added to the plate (50 μl/well) and incubated for 2 h at 37° C. A standard curve of known lanadelumab concentrations ranging from 360 to 0.001 ng/mL was included in each plate. Plate was washed with PBST for five times after incubation. The levels of lanadelumab was detected by incubation with horseradish peroxidase-conjugated goat anti-human IgG (H+L) (200 ng/mL; Bethyl, Montgomery, Tex.) for 1 h at 37° C. The optical density was assessed using KPL TMB Microwell Peroxidase Substrate System (Seracare, Milford, Mass.) following the manufacturer's specifications. Data analysis was performed with SoftMax Pro version 7.0.2 software (Molecular Devices, Sunnyvale, Calif.).

### Results

[1375] A. Results from a representative experiment are shown in FIG. 25. Serum analysis of AAV8-, AAV9-injected and control (vehicle) NSG mice at 7 weeks post gene transfer showed expression and serum accumulation of Lanadelumab following AAV9 delivery (2E¹¹ gc). Serum Lanadelumab concentration was 100-fold higher in AAV9-injected mice compared to AAV8-injected mice and slightly higher in IV-AAV9-injected compared to IM-AAV9-injected mice. Serum human antibody levels in control mice were undetectable at 7 week time point.

[1376] B. In an analogous experiment, a time course of lanadelumab serum levels in NSG mice post-AAV9 administration (n=5 per group) was performed. AAV9 vectors (2E¹¹ gc) were injected either IV or IM (as above, in experiment A), and serum antibody levels were determined by ELISA at day 7 (D7), day 21 (D21), day 35 (D35), and day 49 (D49).

[1377] Serum Lanadelumab expression is detectable as early as 1 week (D7) after AAV9 administration in NSG mice. The expression levels increased at 3 weeks (D2), peaked at 5 weeks (D35) and then sustained up to 7 week post-injection (D49). It was observed that serum lanadelumab concentration is higher in IV vs. IM injected mice over the entire time course. See FIG. 26.

[1378] C. In an analogous experiment, a time course of lanadelumab serum levels in C/57BL6 mice post AAV8 administration was performed. The optimized expression cassette containing a liver-specific promoter and a codon optimized and CpG depleted transgene with a modified furin-2A processing signal resulted in robust serum antibody concentration when delivered intravenously using an AAV8 vector. Very high (>1 mg/ml) and sustained levels of functional anti-kallikrein antibody were achieved in the serum of C57BL/6 mice following IV vector administration at a dose of 1E¹³ gc/kg.

### 6.52 Example 52: Analysis of In Vitro Transduction and Expression of Tandem Liver- and Tandem Liver/Muscle-Specific Promoters Driving Expression of Lanadelumab

[1379] Cis plasmids expressing vectorized lanadelumab were packaged in AAV, then rAAV particles evaluated for potency of the transduction by AAV. Each cis plasmid contained lanadelumab (Mab 1) antibody light chain and heavy chain which are multicistrons driven by the CAG, ApoE.hAAT (SEQ ID NO: 412) or LMTP6 (SEQ ID NO: 320) promoter. Full-length lanadelumab antibody light chain and antibody heavy chain genes were separated by a furin 2A linker to ensure separate expression of each antibody chain. The entire cassette is flanked by AAV2 ITRs, and the genome is encapsidated in an AAV8 capsid for delivery to C2C12 cells (1E¹⁰ vg per well). For detection of antibody protein, following transduction, the cells are treated with FITC conjugated anti-Fc (IgG) antibody. The AAV8.CAG.Mab1 and AAV8.LMTP6.Mab1 infected cells show high expression in muscle cells, whereas the AAV8.hAAT.Mab1 infection does not result in expression of the antibody in muscle cells (FIG. 27). Cells appeared to be equally confluent and viable in all test wells, as seen by DAPI (DNA) staining (FIG. 27).

### 6.53 Example 53: Antibody Expression and Vector Biodistribution in Mouse Treated with AAV8 Lanadelumab Vectors Driven by Various Promoters

[1380] Thyroxine binding globulin (TBG) and alpha-1 antitrypsin (hAAT) promoters have been widely used as liver-specific promoters in previous pre-clinical and clinical gene therapy studies. A panel of designed promoter cassettes derived from multiple promoters and enhancers were generated and tested them in vitro by transfecting Huh7 cells, a human liver cell line. Promoter candidates were selected, which include ApoE.hAAT (SEQ ID NO: 412), LSPX1 (SEQ ID NO: 315), LSPX2 (SEQ ID NO: 316), LTP1 (SEQ ID NO: 317) and LMTP6 (SEQ ID NO: 320). AAV8 vectors encoding vectorized lanadelumab regulated by these promoter candidates were then generated. CAG (SEQ ID NO: 411) and TBG (SEQ ID NO: 423) promoters served as controls for ubiquitous and liver-specific promoters, respectfully. Strength of these promoters and vector biodistribution were tested in vivo by measuring lanadelumab protein expression compared to vector genome copy in each wild type mouse.

[1381] Vectors were administered intravenously to C57Bl/6 mice at equivalent doses (2.5×10¹² vg/kg) Mouse serum was collected biweekly, and lanadelumab protein expression levels were determined by ELISA. Liver samples were harvested at 49 days post vector administration. The presence of viral genomes in each sample was quantified using Lanadelumab probe and primer by Droplet Digital PCR (ddPCR) (the NAICA™ system from Stilla). The genome copy number of glucagon was also measured simultaneously in each sample, the viral genomes were then normalized and demonstrated as vector genome copy number per cell (assuming 2 glucagon/cell). Statistical analysis was performed using one-way ANOVA in GraphPad Prism 8.

[1382] Among the AAV8 vectors with liver-specific promoters, the vectors driven by the ApoE.hAAT (SEQ ID NO: 412) and LMTP6 (SEQ ID NO: 320) promoters provided the highest amount of protein expression at all time points (FIG. 28A). While for the biodistribution data, there was no significant difference of vector genome copy number per cell in liver samples in animals treated with vectors driven by different promoters (FIG. 28B).

[1383] All liver-specific promoters outperform the TBG promoter (SEQ ID NO: 423), and the dual-specific LMTP6 promoter (SEQ ID NO: 320) consistently shows the highest expression in the serum (μg/ml) (FIG. 28).

### 6.54 Example 54: Lanadelumab Expression in Rat Serum Following Administration of Vectorized Antibody

[1384] A high level of Lanadelumab expression was detected in the serum of mice treated with AAV-Lanadelumab via IV administration. In parts of the study, the lanadelumab expression levels in different rat strains treated with different doses of AAV-Lanadelumab vectors and controls were examined.

### Experiment 1 (Wistar Rats):

[1385] To evaluate the route and the dose of vector administration in rats, a control vector AAV.CAG-LANv2.T2A (CAG.L02; SEQ ID NO: 437) was tested in Wistar rat. Eight to ten weeks old male Wistar rats were assigned into three groups (n=3 per group) to receive vector administration via IM or IV injection at a dose of 1×10¹³ vg/kg or 1×10¹⁴ vg/kg. Blood was collected at 7 days before treatment and 7, 10, 14, 17, 21, 28, 35, 42 and 49 days post vector administration and processed into serum.

TABLE 9
Study details for Lanadelumab expression in rat serum, Experiment 1.

| | Male 8-10 week old | | | Bleeds—Day sampled (X) | | | | | | | | | | |
|---|---|---|---|---|---|---|---|---|---|---|---|---|---|---|
| Rat | Wistar Rats (180-200 g) | | | Day | Day | Day | Day | Day | Day | Day | Day | Day | Day | Day |
| group | Treatment | N | ROA | −7 | 0 | 7 | 10 | 14 | 17 | 21 | 28 | 35 | 42 | 49 |
| 1 | AAV8.CAG.LANv2.T2A | 3 | IM | X | Administration | X | X | X | X | X | X | X | X | sacrifice |
| | Dose: 1e13 vg/kg | | | | | | | | | | | | | |
| 2 | AAV8.CAG.LANv2.T2A | 3 | IV | X | Administration | X | X | X | X | X | X | X | X | sacrifice |
| | Dose: 1e13 vg/kg | | | | | | | | | | | | | |
| 3 | AAV8.CAG.LANv2.T2A | 3 | IV | X | Administration | X | X | X | X | X | X | X | X | sacrifice |
| | Dose: 1e14 vg/kg | | | | | | | | | | | | | |

[1386] Levels of human IgG antibody in collected rat serum were detected by ELISA. Statistical analysis was done by one-way ANOVA with multiple comparisons at each time point using Prism

TABLE 10
Results of Lanadelumab expression in Wistar rats, Experiment 1

| | AAV8.CAG.Lanv2.T2A | | | AAV8.CAG.Lanv2.T2A | | | AAV8.CAG.Lanv2.T2A | | |
|---|---|---|---|---|---|---|---|---|---|
| Day | 1e13 vg/kg-IM | | | 1e13 vg/kg-IV | | | 1e14 vg/kg-IM | | |
| sampled | Mean | SEM | N | Mean | SEM | N | Mean | SEM | N |
| D7 | 4.1 | 0.96 | 3 | 8.43 | 0.64 | 3 | 33.6 | 13.86 | 3 |
| D10 | 7.67 | 1.91 | 3 | 12.3 | 0.81 | 3 | 64.5 | 30.2 | 3 |
| D14 | 9.37 | 0.73 | 3 | 23.13 | 0.18 | 3 | 123.23 | 69.12 | 3 |
| D17 | 4.97 | 2.23 | 3 | 92 | 53.52 | 3 | 245.17 | 151.09 | 3 |
| D21 | 2.04 | 0.9 | 3 | 33.06 | 5.84 | 3 | 252.63 | 149.41 | 3 |
| D28 | 92.08 | 87.07 | 3 | 65.23 | 41.69 | 3 | 117.97 | 112.47 | 3 |
| D35 | 14.46 | 12.31 | 3 | 88.1 | 56.68 | 3 | 122.97 | 74.94 | 3 |
| D42 | 82.29 | 80.46 | 3 | 40.43 | 26.77 | 3 | 108.02 | 99.26 | 3 |
| D49 | 1.66 | 0.95 | 3 | 81.4 | 39.96 | 3 | 216.30 | 118.18 | 3 |

[1387] The levels of antibody in rat serum were detectable at 7 days post treatment. It increased over time and reached the peak level at 17 (lower dose) and 21 (higher dose) days post treatment in IV groups and 28 days in IM group. The antibody levels gradually decreased and sustains up to 48 days post treatment in all groups. For animals treated with lower dose (1×10¹³ vg/kg) vector, the antibody expression levels in IV groups are significantly higher than that in IM group at 7, 14 and 21 days post vector administration. For animals received IV administration, the antibody expression levels were dose-dependent at all time points. The highest level of lanadelumab expression was 252.6±149.4 μg/ml, which was detected in animals treated with higher dose (1×10¹⁴ vg/kg) at 21 days post IV administration. See FIG. 30A.

### Experiment 2 (Wistar and Sprague-Dawley Rats):

[1388] The aim of this experiment was to investigate the rat strain and the vector dose that will be used for a rat efficacy study. Eight to ten weeks old male Wistar and Sprague-Dawley (SD) rats were assigned into four groups (n=3 per group) to receive treatment of AAV8 vector carrying genome encoding lanadelumab driven by a universal promoter, CAG.L02 (SEQ ID NO: 437), or a liver-specific promoter, ApoE.hAAT.L02 (SEQ ID NO: 439). Vectors were administered via IV injection at a dose of 5×10¹³ vg/kg. Blood was collected at 7 days before treatment and 7, 10, 14, 17, 21, 28, 35, 42 and 49 days post vector administration and processed into the serum (Table 11). Levels of human IgG antibody in collected rat serum were detected by ELISA. Statistical analysis was done by one-way ANOVA with multiple comparisons at each time point using Prism.

TABLE 11
Study details for lanadelumab expression in rat serum, Experiment 2.

| | Male·8-10·week·old·¶ | | | | | | | | | | | | |
|---|---|---|---|---|---|---|---|---|---|---|---|---|---|
| | Wistar· or· Sprague· Dawley· (SD)· Rats | | | | | | | | | | | | |
| | (180-200g)¤ | | | → ·Bleeds·—·Day·sampled·(X)¤ | | | | | | | | | |
| Rat· | Treatment¶ | | | Day· | Day· | Day· | Day· | Day· | Day· | Day· | Day· | Day· | Day· |
| group¤ | Dose:·5e13·vg/kg¤ | N¤ | ROA¤ | −1¤ | 0¶¤ | 7¶·¤ | 14¤ | 17¤ | 21·¤ | 28¤ | 35·¤ | 42¤ | 49¤ |
| 1¤ | CAG.L02¶ | 3¤ | IV¤ | X¤ | Administration¤ | X¤ | X¤ | X¤ | X¤ | X¤ | X¤ | X¤ | sacrifice·¤ |
| | Wistar¤ | | | | | | | | | | | | |
| 2¤ | ApoE.hAAT.L02¶ | 3¤ | IV¤ | X¤ | Administration¤ | X¤ | X¤ | X¤ | X¤ | X¤ | X¤ | X¤ | sacrifice¤ |
| | Wistar¤ | | | | | | | | | | | | |
| 3¤ | CAG.L02¶ | 3¤ | IV¤ | X¤ | Administration¤ | X¤ | X¤ | X¤ | X¤ | X¤ | X¤ | X¤ | sacrifice¤ |
| | Sprague·Dawley·(SD)¤ | | | | | | | | | | | | |
| 4¤ | ApoE.hAAT.L02¶ | 3¤ | IV¤ | X¤ | Administration¤ | X¤ | X¤ | X¤ | X¤ | X¤ | X¤ | X¤ | sacrifice¤ |
| | Sprague·Dawley·(SD)¤ | | | | | | | | | | | | |

[1389] In this experiment, a control vector (CAG.L02, SEQ ID NO: 437) and vector ApoE.hAAT.L02 (SEQ ID NO: 439) were tested in Wistar and SD rats, respectively. Lanadelumab expression levels were higher in Wistar rat than SD rat in both vector groups at all time points. At the early time points, animals treated with control vector showed significant higher serum antibody levels than those treated with the liver-specific promoter containing vector. This was observed in Wistar rat at 7 days post treatment, and in SD rat at 7, 14 and 17 days post treatment. In Wistar rats, the concentrations of antibody gradually increased over time in both vectors group. The highest antibody levels were 173.1±78.8 mg/ml and 109.57±18.9 μg/ml at 35 and 49 days respectively in control CAG-Lanadelumab and hAAT-Lanadelumab vector-treated animals. In SD rats, however, the levels of antibody reached peaks at 14 and 21 days in control and lead vector-treated animals, respectively, and decreased gradually afterward in both groups. The highest antibody concentrations were 48.23±3.1 μg/ml and 22.33±8.98 μg/ml in CAG.L02 (SEQ ID NO: 437) and ApoE.hAAT.L02 (SEQ ID NO: 439) vector groups, respectively. See Table 12 and FIG. 30B.

TABLE 12
Results of Lanadelumab expression in Wistar rats, Experiment 2:

| | CAG-Wistar | | | ApoE.hAAT-Wistar | | |
|---|---|---|---|---|---|---|
| Day | 5e13 vg/kg-IV | | | 5e13 vg/kg-IV | | |
| sampled | Mean | SEM | N | Mean | SEM | N |
| D7 | 25.04 | 5.26 | 3 | 5.80 | 0.61 | 3 |
| D14 | 91.50 | 39.90 | 3 | 29.73 | 6.36 | 3 |
| D17 | 111.30 | 51.29 | 3 | 55.10 | 18.60 | 3 |
| D21 | 132.03 | 58.76 | 3 | 75.80 | 17.94 | 3 |
| D28 | 159.90 | 69.08 | 3 | 74.27 | 21.84 | 3 |
| D35 | 173.10 | 78.76 | 3 | 97.67 | 33.89 | 3 |
| D42 | 173.00 | 57.73 | 3 | 83.10 | 27.67 | 3 |
| D49 | 163.57 | 39.45 | 3 | 109.57 | 18.87 | 3 |

### 6.55 Example 55: Characterization of Vectorized Lanadelumab Regulated by Tissue-Specific Promoters Following Intramuscular Administration

[1390] In a previous study, high liver-driven expression of vectorized lanadelumab with AAV8 regulated by the ApoE.hAAT or LMTP6 promoters was identified. The goal of this study was to characterize muscle-driven expression of the LMTP6 promoter following direct injection of lanadelumab vectors into the gastrocnemius (GA) muscle. Animals received bilateral injections of 5×10¹⁰ vg into the GA muscle. Serum was collected biweekly to measure systemic lanadelumab concentration (FIG. 31A). Animals were harvested at 49 days post-injection, and relevant tissues (liver, GA muscle, heart) were analyzed for vector biodistribution and transgene expression.

[1391] Vectors regulated by the hAAT and LMTP6 promoters demonstrated significantly increased antibody concentrations in serum compared to CAG at all time points (FIG. 31A). The hAAT and LMTP6 were not significantly different from each other in this experiment. Vector genome copies per cell of vectorized lanadelumab was detected and quantified in GA, liver and heart (FIG. 31B) with a notable difference of higher quantity of genome detected in heart for the dual muscle/liver promoter, LMTP6 vector. Increased liver RNA expression was also detected for all test vectors directly injected into GA muscle at 49 days (relative fold gene expression compared to a reference gene) (FIG. 31C). Gene expression (mRNA μg/mL) data from each of liver, GA muscle, and heart (FIG. 31D) indicates the dual specificity of LMPT6 in liver and muscle tissues following IM administration, whereas the hAAT-driven samples were reduced in muscle compared to LMTP6 and CAG. Significant differences were also seen between the hAAT and LMTP6 groups.

### 6.56 Example 56: Comparison of Lanadelumab Protein Levels in Mouse Serum Derived from Mice Treated with AAV-Lanadelumab Vectors Produced with Different Production Systems

[1392] Different AAV production protocols were developed to identify methods that can increase AAV titer and scalability, as well as assess the quality of vector product. Cis and trans plasmids to generate AAV8.Lanadelumab rAAV vectors (all having the same transgene driven by a CAG promoter) were constructed by well-known methods suitable for HEK293-transfected cell and also baculovirus (BV)/Sf9 insect cell production methods. Three different BV/Sf9 vector systems, BV1, BV2 and BV3, were provided as well as rAAV vector produced by an HEK293 method as a control. Purified rAAV product was injected into wild-type mice for this protein expression study (Table 13).

[1393] Young adult C57BL/6 mice (aged 8-10 weeks) were administered with above-mentioned vectors at 2.5 E¹² vg/kg via tail vein injection (n=5 per group). Serum was collected from each animal at 7, 21, 35, and 49 days post vector administration. Serum collected two days before injection (Day 0) served as baseline control. Levels of antibody (lanadelumab) expression were detected via ELISA. Data analysis was done by one-way ANOVA with multiple comparisons at each time point using Prism.

TABLE 13
Production system expression study design

| | AAV8.Lanadelumab | | | | | | | | | |
|---|---|---|---|---|---|---|---|---|---|---|
| | 5e10 vg (2.5e12 vg/kg) | | | | | | | | | |
| | rAAV | | | Bleeds sampled (X) | | | | | | |
| Mouse | Production | | | | Day 0 | Day 7 | Day 21 | Day 35 | Day 49 | |
| Group | method | N | ROA | Day −2 | (Week 0) | (Week 1) | (Week 3) | (Week 5) | (Week 7) | Day 50 |
| 1 | HEK cells | 5 | IV | X | Injection | X | X | X | X | Serum |
| 2 | BV1 | 5 | IV | X | Injection | X | X | X | X | Serum |
| Werum 3 | BV2 | 5 | IV | X | Injection | X | X | X | X | Serum |
| 4 | BV3 | 5 | IV | X | Injection | X | X | X | X | Serum |

[1394] All production methods tested are viable based on this study, with greater yields from the HEK cell production method at the time points tested (see FIG. 32). Antibody expression in serum is detectable as early as 7 days post administration in all groups. The average of antibody concentration at Day 7 in the HEK production group is 386 μg/ml, which is significantly higher than other groups (61-102 μg/ml). The levels of antibody expression increase at day 21 by 1-, 6-, 7-, and 4-fold in BV1, BV2 and BV3 groups, respectively. Antibody expression levels sustained at 35 and 49 days post administration. There is no significant difference in between HEK produced vector and BV3 produced vectors at day 21, 35 and 49 time points.

### 6.57 Example 57: Vectorized Human Anti-pKal Antibody, Lanadelumab, Derived from Mouse Serum Suppressed Human pKal Function

[1395] In order to measure pKal function of lanadelumab derived from mouse serum following AAV-lanadelumab administration, we developed a fluorescence-based kinetic enzymatic functional assay. First, activated human plasma kallikrein (Enzyme Research Laboratories) was diluted in sample dilution buffer (SDB; 1×PBS, 3% BSA, 0.1% Tween-20) to top concentration of 100 nM. This pKal was two-fold serially diluted for a total of 12 concentrations in the dilution series (100 nM-0.05 nM). From each dilution, and in duplicate, 254, was placed in one well of a 96-well, opaque flat-bottomed plate along with 254, of SDB. Then, 50 μL of the fluorogenic substrate Pro-Phe-Arg-7-Amino-4-Methylcoumarin (PFR-AMC) (Bachem) prepared at 100 μM in assay buffer (50 mM Tris, 250 mM NaCl, pH 7.5) was added to each well. The samples were immediately run in kinetic mode for AMC fluorescence at excitation/emission wavelengths of 380/460 nm, respectively, for 3 hours using a SpectraMax 3 fluorescent plate reader.

[1396] The signal-to-noise ratio for each pKal concentration RFU (last RFU fluorescent value chosen) was calculated by dividing its RFU by background PFR-AMC substrate fluorescence. The two lowest pKal concentrations with a signal-to-noise ratio ≥2 (6.25 nM and 12.5 nM) were then chosen to evaluate the suppressive effect and range of lanadelumab antibody of pKal function in a lanadelumab dose response. Lanadelumab (GenScript) or human IgG control antibody was diluted in SDB to top concentration of 200 nM and two-fold serially diluted to 0.39 nM. Next, 25 μL pKal (each of two chosen concentrations) was incubated with 25 μL lanadelumab or human IgG at 30° C. for 1 hour. Antibody-pKal mixture was then given PFR-AMC and immediately run in kinetic mode for AMC fluorescence at excitation/emission wavelengths of 380/460 nm, respectively, for 3 hours using a SpectraMax fluorescent plate reader.

[1397] In vitro pKal functional assay. When used, mouse serum was diluted in sample dilution buffer and incubated 1:1 with 6.25 nM (1.56 nM in-well) pKal for 30° C./1 hour. For total IgG purification from mouse serum, antibody was purified using the Protein A Spin Antibody Purification Kit (BioVision) according to manufacturer's protocol. Total antibody concentration was measured using a Nanodrop spectrophotometer, with OD absorbance=280 nM. AMC standard curve was generated by a two-fold downward dilution series of AMC (500 nM, eleven dilutions and blank subtracted) diluted in assay buffer. AMC was read as end point fluorescence at excitation/emission wavelengths of 380/460 nm, respectively. Specific plasma kallikrein activity was calculated as: (adjusted experimental sample Vmax, RFU/sec)×(Conversion factor, AMC standard curve μM/RFU)/(pKal concentration, nM). Percent reduction in pKal activity was derived from calculating day 49 by day −7 pKal activity.

[1398] To determine whether AAV-derived lanadelumab can suppress plasma kallikrein function, we developed the in vitro AMC substrate-based functional assay to address this in a proof-of-concept study (FIGS. 33A and 33B). In this assay, antibody-containing medium is incubated with activated human pKal, as described above. Antibody-bound pKal is then given the synthetic peptide substrate Pro-Phe-Arg conjugated to AMC (PFR-AMC) and amount of released AMC is measured over time at excitation/emission wavelengths of 380/460 nm, respectively, for 3 hours. The assay showed noticeable lanadelumab-mediated suppression of pKal activity down to 0.1 nM (in-well concentration) (FIG. 33C) at a defined enzyme concentration. We first sought to determine whether serum from mice administered lanadelumab-encoded AAV could suppress pKal activity. Serum from mice 49 days post-administration was diluted 1:25 (in range predicted to be suppressive), incubated with pKal in vitro, and pKal activity was assayed. Serum from mice post-vector administration, as opposed to 7 days pre-administration, suppressed pKal activity, as reflected in a significant reduction of enzyme activity and a ˜50% percent reduction in pKal activity between the two time points (FIGS. 33D and 33E).

[1399] Further experiments show that suppression was due to the lanadelumab within the serum. Reasoning that the human IgG, namely lanadelumab, would only be found in the day 49 post-administration IgG fraction, but not the day −7 pre-administration samples, purified and total IgG antibody was used from the aforementioned day −7 and day 49 mouse serum samples to test pKal suppression. Indeed, only lanadelumab-containing purified IgG from day 49 post-administration serum, but not IgG from the pre-administration time point, suppressed human pKal function (FIG. 33F).

### 6.58 Example 58: Effects of AAV-Lanadelumab in Carrageenan Animal Models

### 6.58.1 Example 58A: Effects of AAV-Lanadelumab in the Carrageenan Paw Edema Model in Mice

[1400] Inflammation models induced by carrageenan are frequently used acute inflammation models. Carrageenan (Cg) is a strong chemical agent that functions in stimulating the release of inflammatory and proinflammatory mediators, including bradykinin, histamine, tachykinins, reactive oxygen, and nitrogen species. Typical signs of inflammation include edema, hyperalgesia, and erythema, which develop immediately following the treatment of carrageenan. This example evaluated the effect of AAV-mediated gene delivery of Lanadelumab on carrageenan-induced paw edema in mice.

[1401] In total eighty young adult (8-9 weeks old) male C57BL/6 mice were used for this study. Animals were divided into eight groups as listed in Table 14. Paw edema was induced by a single subcutaneous (s.c.) injection of 30 μL of 0.7% or 1% carrageenan solution. Test vectors and positive control Diclofenac were administered at 21 days and 30 minutes prior to carrageenan treatment. Blood was collected before vectors injection and at 7 and 21 days post injection from mice in groups 1, 3, 4, 5, 7 and 8. Paw volume was measured using a digital Plethysmometer prior to carrageenan injection, and at 2, 4, 6, 8, 24 and 48 hours after injection. All animals were sacrificed 48 hours after carrageenan injection. Liver and paw specimens were also collected at the necropsy.

TABLE 14
Carrageenan (Cg) Paw Edema Mouse Study design

| | | Test Items | Route, Dose | Pre- | |
|---|---|---|---|---|---|
| *Gr. | Group/treatment | Dose level | volume | treatment time | N |
| 1 | Cg (0.7%)/ | 0 | I.P., 10 mL/kg | 30 min | 10 |
| | Vehicle of | | | before Cg | |
| | diclofenac | | | | |
| 2 | Cg ( 0.7%)/ | 60 mg/kg | I.P., 10 mL/kg | 30 min | 10 |
| | Diclofenac | | | before Cg | |
| 3 | Cg ( 0.7%)/ | 1e13 vg/kg | I.V., | 3 weeks | 10 |
| | Vector 1 | | 3.333 mL/kg | before Cg | |
| 4 | Cg (0.7%)/ | 1e13 vg/kg | I.V., | 3 weeks | 10 |
| | AAV8. | | 3.333 mL/kg | before Cg | |
| | ApoE.hAAT.Lan | | | | |
| 5 | Cg (1.0%)/ | 0 | I.P., 10 mL/kg | 30 min | 10 |
| | Vehicle of | | | before Cg | |
| | diclofenac | | | | |
| 6 | Cg (1.0%)/ | 60 mg/kg | I.P., 10 mL/kg | 30 min | 10 |
| | Diclofenac | | | before Cg | |
| 7 | Cg (1.0%)/ | 1e13 vg/kg | I.V., | 3 weeks | 10 |
| | Vector 1 | | 3.333 mL/kg | before Cg | |
| 8 | Cg (1.0%)/ | 1e13 vg/kg | I.V., | 3 weeks | 10 |
| | AAV8. | | 3.333 mL/kg | before Cg | |
| | ApoE.hAAT.Lan | | | | |

Vector 1:AAV8-GFP

[1402] Both 0.7% and 1.0% carrageenan induced swelling in the injected paw; however, swelling was more pronounced with 1.0% carrageenan injection (FIGS. 34, A-L). In the positive control groups (Group 2 and 6), diclofenac treatment significantly decreased the paw volume at 2, 4, 6, 8 and 24 hours post carrageenan injection in 1.0% Cg model (group 2), while a significant decrease on paw volume was observed only at 4 and 24 hours post injection in 0.7% Cg model (group 6).

[1403] ApoE.hAAT.L02 (SEQ ID NO: 439) treatment significantly reduced the paw volume at 2, 4, 6 and 8 hours post carrageenan injection in 1,0% Cg model when compared with the vehicle control group (group 1, vector formulation buffer) (FIGS. 35A and 35B). However, no effect of ApoE.hAAT.L02 treatment was observed in 0.7% Cg model at any time points (FIGS. 35A and 35 B). There is no significant difference in between groups treated with vehicle (groups 1 and 4) or control vector (AAV-GFP, groups 3 and 7) in both 1.0% and 0.7% Cg models (FIGS. 33A-L). All data was analyzed with One-way ANOVA with Dunnett's post-hoc test for multiple comparisons.

[1404] These data indicate that acute inflammation can be successfully induced in mouse paw with a single subcutaneous injection of 1% carrageenan solution. Lanadelumab, a human IgG antibody produced in mouse serum via AAV-mediated gene delivery significantly reduces the severity of inflammation in mouse 1% carrageenan model.

### 6.58.2 Example 58B: Efficacy Study of AAV-Lanadelumab on Carrageenan-Induced Paw Edema in Wistar Rats

[1405] This project aims to evaluate the efficacy of AAV-mediated antibody (Lanadelumab) therapy on Carrageenan-induced paw edema in Wistar rats. The experiment involves 50 male Wistar rats in total, divided into 5 groups (see Table. 15). Paw edema will be induced by a single subcutaneous (s.c.) injection of 100 μL of 1% carrageenan solution. Test articles will be administered at different time points (30 minutes, 21 days, 24 hours, or 1 hour) prior to carrageenan treatment.

TABLE 15
Grouping and Treatment for Wistar Rat Study

| | | | | | | | Dosage | |
|---|---|---|---|---|---|---|---|---|
| Group | N | Carrageenan | Treatment | R.O.A | Dosing Time | Conc. | mL/kg | mg/kg/vg/kg |
| 1 | 10 | Yes | Vehicle^{a} | IV | 30 min prior to | N/A | 1.6 | N/A |
| | | | | | Carrageenan injection | | | |
| 2 | 10 | Yes | ApoE.hAAT.L02 | IV | 21 days prior to | 6.25E+13 | 1.6 | 1e14 |
| | | | | | Carrageenan injection | vg/mL | | vg/kg |
| 3 | 10 | Yes | Control AAV | IV | 21 days prior to | 6.25E+13 | 1.6 | 1e14 |
| | | | (irrelevant transgene) | | Carrageenan injection | vg/ml | | vg/kg |
| 4 | 10 | Yes | Lanadelumab | SC | 24 hours prior to | 4.81 | 6.237 | 30 |
| | | | | | Carrageenan injection | mg/ml | | mg/kg |
| 5 | 10 | Yes | Dexamethasone^{b} | PO | 1 hour prior to | 1 | 10 | 10 |
| | | | | | and 6 hours after | mg/ml | | mg/kg |
| | | | | | Carrageenan injection | | | |

^{a}Formulation buffer
^{b}Normal saline

[1406] Body weight will be measured twice a week. On 7 days before vectors administration, and 7 and 14 days post-vector injection, 0.3 mL of blood will be collected by retroorbital/submandibular bleeding in all rats, and then processed into serum. Paw volume will be measured prior to carrageenan injection, and at 2, 4, 6, 8, 24 hours post carrageenan injection. All animals will be sacrificed 24 hours after carrageenan injection. At necropsy, blood will be collected for serum preparation by intracardiac puncture. Then, three pieces of liver (approximately 50 mg per unit) from the same lobe of each animal will be collected and cryopreserved in three separate tubes, respectively. The right paw from all rats will be resected, formalin-fixed, and embedded in paraffin (FFPE). See Table 16.

TABLE 16
Measurement and Sampling Regime for Wistar Rat Study

| | | | | | | | | Paw edema measurement | | | | | | Bleed and |
|---|---|---|---|---|---|---|---|---|---|---|---|---|---|---|
| | Bleed | Treatment | Bleed | Bleed | Treatment | Treatment | Carageenan | (hr post carrageenan) | | | | | | end of study |
| Group | Day −7 | Day 0 | Day 7 | Day 14 | Day 20 | Day 21 | Day 21 | 0 h | 2 h | 4 h | 6 h | 8 h | 24 h | Day 22 |
| 1 | √ | x | √ | √ | x | Vehicle | √ | √ | √ | √ | √ | √ | √ | √ |
| 2 | √ | AAV8.Lan | √ | √ | x | x | √ | √ | √ | √ | √ | √ | √ | √ |
| 3 | √ | Control AAV | √ | √ | x | x | √ | √ | √ | √ | √ | √ | √ | √ |

Data will be presented as mean±SEM. Statistical analysis including t-test or ANOVA will be performed using Graphpad, prism 6.0 with the significance level alpha of 0.05.

### 6.59 Example 59: AAV-Mediated Anti-Plasma Kallikrein Antibody Treatment for Diabetic Retinopathy

[1407] Diabetic retinopathy (DR) and diabetic macular edema (DME) are the most common complications of diabetes and the leading causes of blindness among working-age adults. Chronic hyperglycemia leads to retinal microvasculature damage and promote an increase in microvascular permeability, upregulation of inflammatory response, and fluid accumulation into the neural retina, which ultimately result in visual loss. Intravitreal administration of anti-VEGFs is the first-line treatment for DME. However, DME response to anti-VEGF is highly variable. Only 54% of DME patients treated with consecutive, monthly anti-VEGF gain vision (Elman M J, Aiello L P, Beck R W, et al. Randomized trial evaluating ranibizumab plus prompt or deferred laser or triamcinolone plus prompt laser for diabetic macular edema. Ophthalmology 2010; 117:1064-1077; Brown D M, Nguyen Q D, Marcus D M, et al. Long-term outcomes of ranibizumab therapy for diabetic macular edema: The 36-month results from two phase III trials: RISE and RIDE. Ophthalmology 2013; 120:2013-2022). Recent studies suggested that plasma kallikrein, a mediator of vascular leakage and inflammation, may play an important role in the pathogenesis of DR and DME independent of VEGF (Gao -B-B, Clermont A, Rook S, et al. Extracellular carbonic anhydrase mediates hemorrhagic retinal and cerebral vascular permeability through prekallikrein activation. Nature Medicine 2007; 13:181; Clermont A, Chilcote T J, Kita T, et al. Plasma kallikrein mediates retinal vascular dysfunction and induces retinal thickening in diabetic rats. Diabetes 2011; 60:1590-1598; and Kita T, Clermont A C, Murugesan N, et al. Plasma kallikrein-kinin system as a VEGF-independent mediator of diabetic macular edema. Diabetes 2015; 64:3588-3599). Plasma kallikrein inhibitors could be the potential alternative therapies for DR and DME patients who are not response to anti-VEGF therapies. This study aims to test the possibility of therapy for DR/DME using ocular vectorized antibody delivery with adeno-associated virus (AAV) gene transfer.

[1408] Vectorized anti-plasma kallikrein antibody (anti-pKal Ab such as Lanadelumab) sequence has been constructed and tested for its use in treatment of hereditary angioedema (HAE), as described above. In this study AAV8.CAG.LAN Ab and AAV8.CAG.GFP will be used as test vectors. AAV8.NUL will serve as a control vector.

[1409] First, the transduction efficiency and cell type specificity is evaluated in wild type rats. Adult Wistar rats (3-4 months old) will be used for this study. Vectors including AAV8.CAG.LAN Ab, AAV8.CAG.GFP and AAV8.NUL, will be delivered in rat eyes via subretinal (SR) injection at different doses (5×10⁸ vg/eye and 5×10⁹ vg/eye) in 3 μl of formulation buffer. Fundus and OCT imaging will be performed at 2, 4 and 8 weeks after SR injection. Ocular tissue specimens will be collected at 8 weeks post administration. Levels of antibody expression in individual ocular tissues including retina and retinal pigment epithelium (RPE) will be quantified by ELISA. Cell type specificity will be determined by immunofluorescent staining with various retinal cell markers.

[1410] Streptozotocin (STZ)-induced diabetic Wistar rats will be used as the animal model for efficacy studies. Diabetes will be induced by intravenous injection of STZ at the dose of 60 mg/kg of the body weight in young adult Wistar rats (8-10 weeks old). Significant and progressive loss of visual acuity generally starts at 8 weeks following induction in this model. AAV8.CAG.pKal Ab vector will be injected subretinally at 4 or 8 weeks after the induction of Diabetes. Contralateral eye will be injected with AAV.NUL vector and serve as a control. Fundus, fluorescein angiography (FA) and OCT imaging, electroretinography (ERG) and Optokinetic nystagmus (OKN) will be tested at 8, 12 and 16 weeks following induction of Diabetes. Ocular tissues or the whole eyeballs will be collected at 16-17 weeks post Diabetes induction. Antibody expression in ocular tissues will be quantified by ELISA. Retina structure changes and neuron survival will be evaluated by histology and immunofluorescent staining.

### 6.60 Example 60: Characterization of Tissue-Restricted Transgene Immunogenicity

[1411] The goal of this study is to understand transgene immunogenicity and/or tolerance induction in the context of ubiquitous, tissue-specific, or tandem promoters. Hypothesis: Vectors driven by liver-specific and liver-muscle tandem promoters will demonstrate reduced immunogenicity compared to vectors driven by a ubiquitous promoter. To test this hypothesis, four AAV vectors that drive expression of a highly immunogenic membrane-bound ovalbumin (mOVA) were constructed. These vectors differ in their promoter sequences which includes: a) a ubiquitous CAG promoter (SEQ ID NO: 411) b) the liver-specific hAAT promoter with upstream ApoE enhancer (SEQ ID NO: 412) c) the muscle-specific CK8 promoter cassette composed of the CK core promoter and three copies of a modified MCK enhancer (SEQ ID NO: 413) and d) liver-muscle tandem promoter 6 (LMTP6, SEQ ID NO: 320) that contains sequence elements derived from hAAT and CK8. Initial experiments will measure the immune response following intravenous (IV) vector administration within mice. Study endpoints will include characterization of humoral and cell-mediated immune responses against the mOVA transgene product. In addition, tissues will be harvested for vector biodistribution and transgene expression analysis.

### 6.61 Example 61: Plasma Expression of Vectorized Lanadelumab in Cynomolgus Monkeys

[1412] Plasma kinetics of lanadelumab expression in non-human primates administered AAV vectors encoding lanadelumab antibodies will be assessed. The goal is to assess and select the dose of AAV8.ApoE.hAAT.Lan vector that results in sustained lanadelumab expression of at least 200 μg/ml lanadelumab by three months or more. The cynomolgus monkey is chosen as the test system because of its established usefulness and acceptance as a model for AAV biodistribution studies in a large animal species and for further translation to human. All animals on this study are naïve with respect to prior treatment.

[1413] Nine cynomolgus animals will be used. Animals judged suitable for experimentation based on clinical sign data and prescreening antibody titers will be placed in three study groups, each receiving a different dosage of AAV vector, by body weight using computer-generated random numbers. Each set of three animals will be administered a single i.v. dose of the vector AAV8.ApoE.hAAT.Lan vector (described above) at the dose of 1e12 gc/kg (Group 1), 1e13 gc/kg (Group 2), and 1e14 gc/kg (Group 3).

[1414] Clinical signs will be recorded at least once daily beginning approximately two weeks prior to initiation of dosing and continuing throughout the study period. The animals will be observed for signs of clinical effects, illness, and/or death. Additional observations may be recorded based upon the condition of the animal at the discretion of the Study Director and/or technicians.

[1415] Blood samples will be collected from a peripheral vein for bioanalytical analysis prior to dose administration and then at weekly intervals for at least 3 months (9 weeks). The samples will be collected in clot tubes and the times recorded. The tubes will be maintained at room temperature until fully clotted, then centrifuged at approximately 2400 rpm at room temperature for 15 minutes. The serum will be harvested, placed in labeled vials, frozen in liquid nitrogen, and stored at −60° C. or below.

[1416] A gross necropsy will be performed on any animal found dead or sacrificed moribund, and at the end of the study period, at least three months after vector administration. All animals, except those found dead, will be sedated with 8 mg/kg of ketamine HCl IM, maintained on an isoflurane/oxygen mixture and provided with an intravenous bolus of heparin sodium, 200 IU/kg. The animals will be perfused via the left cardiac ventricle with 0.001% sodium nitrite in saline. Animals found dead will be necropsied but will not be perfused.

[1417] As primary endpoint analysis, plasma samples will be assayed for lanadelumab concentration by ELISA and/or western blot, to be reported at least as μg lanadelumab per ml plasma; and lanadelumab activity, for example, kallikrein inhibition, by fluorogenic assay.

[1418] The presence of antibodies against lanadelumab (ADAs) in the serum will be evaluated by ELISA and lanadelumab binding assays. Biodistribution of the vector and lanadelumab coding transcripts will be assessed in necroscopy samples by quantitative PCR and NGS methods. Tissues to be assayed include liver, muscle, and heart. Toxicity assessment will be done by full pathology, including assaying liver enzymes, urinalysis, cardiovascular health, and more.

### 6.62 Example 62: Vectorized Adalimumab IgG and Fab Cassettes: Design and Characterization

[1419] An AAV transgene cassette was constructed (SEQ ID NO: 451) that drives ubiquitous expression of vectorized adalimumab IgG (TNF001, SEQ ID NO: 452). The protein coding sequence is composed of the heavy and light chains of adalimumab separated by a Furin cleavage site, Gly-Ser-Gly (GSG) linker (SEQ ID NO: 427), and T2A self-processing peptide sequence (SEQ ID NO: 429). The specific sequence configuration yields expression of separate heavy and light chain peptides. The entire reading frame is codon-optimized and depleted of CpG dinucleotides. Expression is driven by the CAG promoter (SEQ ID NO: 411). Similarly, an additional cassette was developed (SEQ ID NO: 453) that drives expression of a Fab containing the adalimumab variable regions (TNF002, SEQ ID NO: 454). Constructs are outlined in FIG. 1, and FIG. 12A and sequences are provided in Table. 17.

TABLE 17

| Name/ | |
|---|---|
| SEQ ID NO. | Sequence |
| TNF001 | gacattgattattgactagttattaatagtaatcaattacggggtcattagttcatagcc |
| SEQ ID NO: 451 | catatatggagttccgcgttacataacttacggtaaatggcccgcctggctgaccgccca |
| | acgacccccgcccattgacgtcaataatgacgtatgttcccatagtaacgccaataggga |
| | ctttccattgacgtcaatgggtggagtatttacggtaaactgcccacttggcagtacatc |
| | aagtgtatcatatgccaagtacgccccctattgacgtcaatgacggtaaatggcccgcct |
| | ggcattatgcccagtacatgaccttatgggactttcctacttggcagtacatctacgtat |
| | tagtcatcgctattaccatggtcgaggtgagccccacgttctgcttcactctccccatct |
| | cccccccctccccacccccaattttgtatttatttattttttaattattttgtgcagcga |
| | tgggggcggggggggggggggggcgcgcgccaggcggggcggggcggggcgaggggcggg |
| | gcggggcgaggcggagaggtgcggcggcagccaatcagagcggcgcgctccgaaagtttc |
| | cttttatggcgaggcggcggcggcggcggccctataaaaagcgaagcgcgcggcgggcgg |
| | gagtcgctgcgcgctgccttcgccccgtgccccgctccgccgccgcctcgcgccgcccgc |
| | cccggctctgactgaccgcgttactcccacaggtgagcgggcgggacggcccttctcctc |
| | cgggctgtaattagcgcttggtttaatgacggcttgtttcttttctgtggctgcgtgaaa |
| | gccttgaggggctccgggagggccctttgtgcggggggagcggctcggggggtgcgtgcg |
| | tgtgtgtgtgcgtggggagcgccgcgtgcggctccgcgctgcccggcggctgtgagcgct |
| | gcgggcgcggcgcggggctttgtgcgctccgcagtgtgcgcgaggggagcgcggccgggg |
| | gcggtgccccgcggtgcggggggggctgcgaggggaacaaaggctgcgtgcggggtgtgt |
| | gcgtgggggggtgagcagggggtgtgggcgcgtcggtcgggctgcaaccccccctgcacc |
| | cccctccccgagttgctgagcacggcccggcttcgggtgcggggctccgtacggggcgtg |
| | gcgcggggctcgccgtgccgggcggggggtggcggcaggtgggggtgccgggcggggcgg |
| | ggccgcctcgggccggggagggctcgggggaggggcgcggcggcccccggagcgccggcg |
| | gctgtcgaggcgcggcgagccgcagccattgccttttatggtaatcgtgcgagagggcgc |
| | agggacttcctttgtcccaaatctgtgcggagccgaaatctgggaggcgccgccgcaccc |
| | cctctagcgggcgcggggcgaagcggtgcggcgccggcaggaaggaaatgggcggggagg |
| | gccttcgtgcgtcgccgcgccgccgtccccttctccctctccagcctcggggctgtccgc |
| | ggggggacggctgccttcgggggggacggggcagggcggggttcggcttctggcgtgtga |
| | ccggcggctctagagcctctgctaaccatgttcatgccttcttctttttcctacagctcc |
| | tgggcaacgtgctggttattgtgctgtctcatcattttggcaaagaattcgccaccatgt |
| | acagaatgcagctgctgctgctcattgccctgtctctggccctggtcaccaattctgaag |
| | tgcagctggtggaaagtggtggtggactggtgcagcctggcagaagcctgagactgtctt |
| | gtgctgcctctggcttcacctttgatgactatgccatgcactgggtcagacaggcccctg |
| | gcaaaggactggaatgggtgtcagccatcacctggaactctggccacattgactatgctg |
| | actctgtggaaggcagattcaccatcagcagagacaatgccaagaacagcctgtacctgc |
| | agatgaactccctgagagctgaggacacagcagtgtactactgtgccaaggtgtcctacc |
| | tgagcacagccagcagcctggattattggggccagggcacactggttacagtgtcctctg |
| | ccagcacaaagggcccctctgtttttccactggctcccagcagcaagagcaccagtggtg |
| | gaacagctgccctgggctgtctggtcaaggattacttccctgagcctgtgacagtgtctt |
| | ggaactcaggggctctgacctctggggtgcacacatttccagctgtgctgcagtcctctg |
| | gcctgtactctctgtcctctgtggtcacagtgcctagctctagcctgggcacccagacct |
| | acatctgcaatgtgaaccacaagcctagcaacaccaaggtggacaagaaggtggaaccca |
| | agagctgtgacaagacccacacctgtcctccatgtcctgctccagaactgcttggaggcc |
| | cttctgtgttcctgtttcctccaaagcctaaggacaccctgatgatcagcagaacccctg |
| | aagtgacctgtgtggtggttgatgtgtcccatgaggacccagaagtgaagttcaattggt |
| | atgtggatggggttgaagtgcacaatgctaagaccaagcctagagaggaacagtacaaca |
| | gcacctacagagtggtgtctgtgctgacagtgctgcatcaggactggctgaatggcaaag |
| | agtacaagtgcaaagtgtccaacaaggccctgcctgctcctattgagaaaaccatctcca |
| | aggccaagggccagccaagagaaccccaggtttacacactgccacctagcagagatgagc |
| | tgaccaagaaccaggtgtccctgacctgcctggttaagggcttctacccctctgacattg |
| | ctgtggaatgggagagcaatggccagcctgagaacaactacaagacaacccctcctgtgc |
| | tggactctgatggctcattcttcctgtacagcaagctgactgtggacaagtccagatggc |
| | agcaggggaatgtgttcagctgctctgtgatgcatgaggccctgcacaaccactacaccc |
| | agaaaagtctgagtctgagccctggcaagagaaagagaagaggctctggagaaggcagag |
| | gctccctgctgacatgtggggatgttgaagagaatcctgggcctatgtataggatgcaac |
| | tgctcctcctgattgctctgagcctggctcttgtgaccaactctgacatccagatgacac |
| | agagccctagcagcctgtctgcttctgtgggagacagagtgaccatcacatgcagagcca |
| | gccagggaatcagaaactacctggcctggtatcagcaaaagcctggcaaggcccctaagc |
| | tgctgatctatgcagccagcacactgcagtcaggggtgccaagcagattttcaggctctg |
| | gctctggcacagacttcaccctgaccatttctagcctgcagcctgaggatgtggccacct |
| | actactgccagagatacaacagagccccatacacctttggacagggcacaaaggtggaaa |
| | tcaagagaacagtggctgccccatctgtgttcatcttcccaccatctgatgaacagctga |
| | agtctggcactgcctctgttgtgtgcctgctgaacaacttctaccctagagaagccaagg |
| | tgcagtggaaggttgacaatgccctgcagtctggcaatagccaagaatctgtgacagagc |
| | aggactccaaggattccacctacagcctgagcagcaccctgacactgagcaaggctgact |
| | atgagaagcacaaagtgtatgcctgtgaagtgacacaccagggactgagcagcccagtga |
| | ccaagagcttcaacaggggagagtgctgataactcgaggacggggtgaactacgcctgag |
| | gatccgatctttttccctctgccaaaaattatggggacatcatgaagccccttgagcatc |
| | tgacttctggctaataaaggaaatttattttcattgcaatagtgtgttggaattttttgt |
| | gtctctcactcg |
| Adalimumab | atgtacagaatgcagctgctgctgctcattgccctgtctctggccctggtcaccaattct |
| Full-length mAb | gaagtgcagctggtggaaagtggtggtggactggtgcagcctggcagaagcctgagactg |
| single chain | tcttgtgctgcctctggcttcacctttgatgactatgccatgcactgggtcagacaggcc |
| construct | cctggcaaaggactggaatgggtgtcagccatcacctggaactctggccacattgactat |
| transgene | gctgactctgtggaaggcagattcaccatcagcagagacaatgccaagaacagcctgtac |
| (TNF001) | ctgcagatgaactccctgagagctgaggacacagcagtgtactactgtgccaaggtgtcc |
| (HC-Furin- | tacctgagcacagccagcagcctggattattggggccagggcacactggttacagtgtcc |
| linker-T2A-LC) | tctgccagcacaaagggcccctctgtttttccactggctcccagcagcaagagcaccagt |
| SEQ ID NO: 452 | ggtggaacagctgccctgggctgtctggtcaaggattacttccctgagcctgtgacagtg |
| | tcttggaactcaggggctctgacctctggggtgcacacatttccagctgtgctgcagtcc |
| | tctggcctgtactctctgtcctctgtggtcacagtgcctagctctagcctgggcacccag |
| | acctacatctgcaatgtgaaccacaagcctagcaacaccaaggtggacaagaaggtggaa |
| | cccaagagctgtgacaagacccacacctgtcctccatgtcctgctccagaactgcttgga |
| | ggcccttctgtgttcctgtttcctccaaagcctaaggacaccctgatgatcagcagaacc |
| | cctgaagtgacctgtgtggtggttgatgtgtcccatgaggacccagaagtgaagttcaat |
| | tggtatgtggatggggttgaagtgcacaatgctaagaccaagcctagagaggaacagtac |
| | aacagcacctacagagtggtgtctgtgctgacagtgctgcatcaggactggctgaatggc |
| | aaagagtacaagtgcaaagtgtccaacaaggccctgcctgctcctattgagaaaaccatc |
| | tccaaggccaagggccagccaagagaaccccaggtttacacactgccacctagcagagat |
| | gagctgaccaagaaccaggtgtccctgacctgcctggttaagggcttctacccctctgac |
| | attgctgtggaatgggagagcaatggccagcctgagaacaactacaagacaacccctcct |
| | gtgctggactctgatggctcattcttcctgtacagcaagctgactgtggacaagtccaga |
| | tggcagcaggggaatgtgttcagctgctctgtgatgcatgaggccctgcacaaccactac |
| | acccagaaaagtctgagtctgagccctggcaagagaaagagaagaggctctggagaaggc |
| | agaggctccctgctgacatgtggggatgttgaagagaatcctgggcctatgtataggatg |
| | caactgctcctcctgattgctctgagcctggctcttgtgaccaactctgacatccagatg |
| | acacagagccctagcagcctgtctgcttctgtgggagacagagtgaccatcacatgcaga |
| | gccagccagggaatcagaaactacctggcctggtatcagcaaaagcctggcaaggcccct |
| | aagctgctgatctatgcagccagcacactgcagtcaggggtgccaagcagattttcaggc |
| | tctggctctggcacagacttcaccctgaccatttctagcctgcagcctgaggatgtggcc |
| | acctactactgccagagatacaacagagccccatacacctttggacagggcacaaaggtg |
| | gaaatcaagagaacagtggctgccccatctgtgttcatcttcccaccatctgatgaacag |
| | ctgaagtctggcactgcctctgttgtgtgcctgctgaacaacttctaccctagagaagcc |
| | aaggtgcagtggaaggttgacaatgccctgcagtctggcaatagccaagaatctgtgaca |
| | gagcaggactccaaggattccacctacagcctgagcagcaccctgacactgagcaaggct |
| | gactatgagaagcacaaagtgtatgcctgtgaagtgacacaccagggactgagcagccca |
| | gtgaccaagagcttcaacaggggagagtgctga |
| TNF002 | gacattgattattgactagttattaatagtaatcaattacggggtcattagttcatagcc |
| SEQ ID NO: 453 | catatatggagttccgcgttacataacttacggtaaatggcccgcctggctgaccgccca |
| | acgacccccgcccattgacgtcaataatgacgtatgttcccatagtaacgccaataggga |
| | ctttccattgacgtcaatgggtggagtatttacggtaaactgcccacttggcagtacatc |
| | aagtgtatcatatgccaagtacgccccctattgacgtcaatgacggtaaatggcccgcct |
| | ggcattatgcccagtacatgaccttatgggactttcctacttggcagtacatctacgtat |
| | tagtcatcgctattaccatggtcgaggtgagccccacgttctgcttcactctccccatct |
| | cccccccctccccacccccaattttgtatttatttattttttaattattttgtgcagcga |
| | tgggggcggggggggggggggggcgcgcgccaggcggggcggggcggggcgaggggcggg |
| | gcggggcgaggcggagaggtgcggcggcagccaatcagagcggcgcgctccgaaagtttc |
| | cttttatggcgaggcggcggcggcggcggccctataaaaagcgaagcgcgcggcgggcgg |
| | gagtcgctgcgcgctgccttcgccccgtgccccgctccgccgccgcctcgcgccgcccgc |
| | cccggctctgactgaccgcgttactcccacaggtgagcgggcgggacggcccttctcctc |
| | cgggctgtaattagcgcttggtttaatgacggcttgtttcttttctgtggctgcgtgaaa |
| | gccttgaggggctccgggagggccctttgtgcggggggagcggctcggggggtgcgtgcg |
| | tgtgtgtgtgcgtggggagcgccgcgtgcggctccgcgctgcccggcggctgtgagcgct |
| | gcgggcgcggcgcggggctttgtgcgctccgcagtgtgcgcgaggggagcgcggccgggg |
| | gcggtgccccgcggtgcggggggggctgcgaggggaacaaaggctgcgtgcggggtgtgt |
| | gcgtgggggggtgagcagggggtgtgggcgcgtcggtcgggctgcaaccccccctgcacc |
| | cccctccccgagttgctgagcacggcccggcttcgggtgcggggctccgtacggggcgtg |
| | gcgcggggctcgccgtgccgggcggggggtggcggcaggtgggggtgccgggcggggcgg |
| | ggccgcctcgggccggggagggctcgggggaggggcgcggcggcccccggagcgccggcg |
| | gctgtcgaggcgcggcgagccgcagccattgccttttatggtaatcgtgcgagagggcgc |
| | agggacttcctttgtcccaaatctgtgcggagccgaaatctgggaggcgccgccgcaccc |
| | cctctagcgggcgcggggcgaagcggtgcggcgccggcaggaaggaaatgggcggggagg |
| | gccttcgtgcgtcgccgcgccgccgtccccttctccctctccagcctcggggctgtccgc |
| | ggggggacggctgccttcgggggggacggggcagggcggggttcggcttctggcgtgtga |
| | ccggcggctctagagcctctgctaaccatgttcatgccttcttctttttcctacagctcc |
| | tgggcaacgtgctggttattgtgctgtctcatcattttggcaaagaattcgccaccatgt |
| | acagaatgcagctgctgctgctcattgccctgtctctggccctggtcaccaattctgaag |
| | tgcagctggtggaaagtggtggtggactggtgcagcctggcagaagcctgagactgtctt |
| | gtgctgcctctggcttcacctttgatgactatgccatgcactgggtcagacaggcccctg |
| | gcaaaggactggaatgggtgtcagccatcacctggaactctggccacattgactatgctg |
| | actctgtggaaggcagattcaccatcagcagagacaatgccaagaacagcctgtacctgc |
| | agatgaactccctgagagctgaggacacagcagtgtactactgtgccaaggtgtcctacc |
| | tgagcacagccagcagcctggattattggggccagggcacactggttacagtgtcctctg |
| | ccagcacaaagggcccctctgtttttccactggctcccagcagcaagagcaccagtggtg |
| | gaacagctgccctgggctgtctggtcaaggattacttccctgagcctgtgacagtgtctt |
| | ggaactcaggggctctgacctctggggtgcacacatttccagctgtgctgcagtcctctg |
| | gcctgtactctctgtcctctgtggtcacagtgcctagctctagcctgggcacccagacct |
| | acatctgcaatgtgaaccacaagcctagcaacaccaaggtggacaagaaggtggaaccca |
| | agagctgtgacaagacccacagaaagagaagaggctctggagaaggcagaggctccctgc |
| | tgacatgtggggatgttgaagagaatcctgggcctatgtataggatgcaactgctcctcc |
| | tgattgctctgagcctggctcttgtgaccaactctgacatccagatgacacagagcccta |
| | gcagcctgtctgcttctgtgggagacagagtgaccatcacatgcagagccagccagggca |
| | tcagaaactacctggcctggtatcagcagaagccaggcaaggcccctaagctgctgatct |
| | atgcagccagcacactgcagagtggggtgccaagcagattttcaggctctggctctggca |
| | cagacttcaccctgaccatttctagcctgcagcctgaggatgtggccacctactactgcc |
| | agagatacaacagagccccatacacctttggacagggcacaaaggtggaaatcaagagaa |
| | cagttgcagcaccctcagttttcatcttccccccctcagatgaacagctgaagtctggca |
| | ctgcctctgttgtgtgcctgctgaacaacttctaccccagagaagccaaggtgcagtgga |
| | aggttgacaatgccctgcagtcaggcaacagccaagaatctgtgactgaacaggattcca |
| | aggatagcacctacagcctgagcagcaccctgacactgagcaaggctgactatgagaagc |
| | acaaagtgtatgcctgtgaagtgacccaccagggactgagcagcccagtgaccaagagct |
| | tcaacaggggagagtgctgataactcgaggacggggtgaactacgcctgaggatccgatc |
| | tttttccctctgccaaaaattatggggacatcatgaagccccttgagcatctgacttctg |
| | gctaataaaggaaatttattttcattgcaatagtgtgttggaattttttgtgtctctcac |
| | tcg |
| Adalimumab | atgtacagaatgcagctgctgctgctcattgccctgtctctggccctggtcaccaattct |
| Fab single chain | gaagtgcagctggtggaaagtggtggtggactggtgcagcctggcagaagcctgagactg |
| construct | tcttgtgctgcctctggcttcacctttgatgactatgccatgcactgggtcagacaggcc |
| transgene | cctggcaaaggactggaatgggtgtcagccatcacctggaactctggccacattgactat |
| (TNF002) | gctgactctgtggaaggcagattcaccatcagcagagacaatgccaagaacagcctgtac |
| (HC-Furin- | ctgcagatgaactccctgagagctgaggacacagcagtgtactactgtgccaaggtgtcc |
| linker-T2A-LC) | tacctgagcacagccagcagcctggattattggggccagggcacactggttacagtgtcc |
| SEQ ID NO: 453 | tctgccagcacaaagggcccctctgtttttccactggctcccagcagcaagagcaccagt |
| | ggtggaacagctgccctgggctgtctggtcaaggattacttccctgagcctgtgacagtg |
| | tcttggaactcaggggctctgacctctggggtgcacacatttccagctgtgctgcagtcc |
| | tctggcctgtactctctgtcctctgtggtcacagtgcctagctctagcctgggcacccag |
| | acctacatctgcaatgtgaaccacaagcctagcaacaccaaggtggacaagaaggtggaa |
| | cccaagagctgtgacaagacccacagaaagagaagaggctctggagaaggcagaggctcc |
| | ctgctgacatgtggggatgttgaagagaatcctgggcctatgtataggatgcaactgctc |
| | ctcctgattgctctgagcctggctcttgtgaccaactctgacatccagatgacacagagc |
| | cctagcagcctgtctgcttctgtgggagacagagtgaccatcacatgcagagccagccag |
| | ggcatcagaaactacctggcctggtatcagcagaagccaggcaaggcccctaagctgctg |
| | atctatgcagccagcacactgcagagtggggtgccaagcagattttcaggctctggctct |
| | ggcacagacttcaccctgaccatttctagcctgcagcctgaggatgtggccacctactac |
| | tgccagagatacaacagagccccatacacctttggacagggcacaaaggtggaaatcaag |
| | agaacagttgcagcaccctcagttttcatcttccccccctcagatgaacagctgaagtct |
| | ggcactgcctctgttgtgtgcctgctgaacaacttctaccccagagaagccaaggtgcag |
| | tggaaggttgacaatgccctgcagtcaggcaacagccaagaatctgtgactgaacaggat |
| | tccaaggatagcacctacagcctgagcagcaccctgacactgagcaaggctgactatgag |
| | aagcacaaagtgtatgcctgtgaagtgacccaccagggactgagcagcccagtgaccaag |
| | agcttcaacaggggagagtgctga |
| Adalimumab | gaagtgcagctggtggaaagtggtggtggactggtgcagcctggcagaagcctgagactg |
| Heavy Chain | tcttgtgctgcctctggcttcacctttgatgactatgccatgcactgggtcagacaggcc |
| (HC) IgG1 | cctggcaaaggactggaatgggtgtcagccatcacctggaactctggccacattgactat |
| SEQ ID NO: 444 | gctgactctgtggaaggcagattcaccatcagcagagacaatgccaagaacagcctgtac |
| | ctgcagatgaactccctgagagctgaggacacagcagtgtactactgtgccaaggtgtcc |
| | tacctgagcacagccagcagcctggattattggggccagggcacactggttacagtgtcc |
| | tctgccagcacaaagggcccctctgtttttccactggctcccagcagcaagagcaccagt |
| | ggtggaacagctgccctgggctgtctggtcaaggattacttccctgagcctgtgacagtg |
| | tcttggaactcaggggctctgacctctggggtgcacacatttccagctgtgctgcagtcc |
| | tctggcctgtactctctgtcctctgtggtcacagtgcctagctctagcctgggcacccag |
| | acctacatctgcaatgtgaaccacaagcctagcaacaccaaggtggacaagaaggtggaa |
| | cccaagagctgtgacaagacccacacctgtcctccatgtcctgctccagaactgcttgga |
| | ggcccttctgtgttcctgtttcctccaaagcctaaggacaccctgatgatcagcagaacc |
| | cctgaagtgacctgtgtggtggttgatgtgtcccatgaggacccagaagtgaagttcaat |
| | tggtatgtggatggggttgaagtgcacaatgctaagaccaagcctagagaggaacagtac |
| | aacagcacctacagagtggtgtctgtgctgacagtgctgcatcaggactggctgaatggc |
| | aaagagtacaagtgcaaagtgtccaacaaggccctgcctgctcctattgagaaaaccatc |
| | tccaaggccaagggccagccaagagaaccccaggtttacacactgccacctagcagagat |
| | gagctgaccaagaaccaggtgtccctgacctgcctggttaagggcttctacccctctgac |
| | attgctgtggaatgggagagcaatggccagcctgagaacaactacaagacaacccctcct |
| | gtgctggactctgatggctcattcttcctgtacagcaagctgactgtggacaagtccaga |
| | tggcagcaggggaatgtgttcagctgctctgtgatgcatgaggccctgcacaaccactac |
| | acccagaaaagtctgagtctgagccctggcaag |
| | IgG1 CH1 and CH2 are shown bold; hinge region is shown in |
| | italic. |
| Adalimumab VH | Gaagtgcagctggtggaaagtggtggtggactggtgcagcctggcagaagcctgagactg |
| SEQ ID NO: 445 | tcttgtgctgcctctggcttcacctttgatgactatgccatgcactgggtcagacaggcc |
| | cctggcaaaggactggaatgggtgtcagccatcacctggaactctggccacattgactat |
| | gctgactctgtggaaggcagattcaccatcagcagagacaatgccaagaacagcctgtac |
| | ctgcagatgaactccctgagagctgaggacacagcagtgtactactgtgccaaggtgtcc |
| | tacctgagcacagccagcagcctggattattggggccagggcacactggttacagtgtcc |
| | tct |
| | CDRs are underlined. |
| IgG1 CH1 | gccagcacaaagggcccctctgtttttccactggctcccagcagcaagagcaccagtggt |
| SEQ ID NO: 446 | ggaacagctgccctgggctgtctggtcaaggattacttccctgagcctgtgacagtgtct |
| | tggaactcaggggctctgacctctggggtgcacacatttccagctgtgctgcagtcctct |
| | ggcctgtactctctgtcctctgtggtcacagtgcctagctctagcctgggcacccagacc |
| | tacatctgcaatgtgaaccacaagcctagcaacaccaaggtggacaagaaggtg |
| IgG1 CH2 | gctccagaactgcttggaggcccttctgtgttcctgtttcctccaaagcctaaggacacc |
| SEQ ID NO: 447 | ctgatgatcagcagaacccctgaagtgacctgtgtggtggttgatgtgtcccatgaggac |
| | ccagaagtgaagttcaattggtatgtggatggggttgaagtgcacaatgctaagaccaag |
| | cctagagaggaacagtacaacagcacctacagagtggtgtctgtgctgacagtgctgcat |
| | caggactggctgaatggcaaagagtacaagtgcaaagtgtccaacaaggccctgcctgct |
| | cctattgagaaaaccatctccaaggccaagggccagccaagagaaccccaggtttacaca |
| | ctgccacctagcagagatgagctgaccaagaaccaggtgtccctgacctgcctggttaag |
| | ggcttctacccctctgacattgctgtggaatgggagagcaatggccagcctgagaacaac |
| | tacaagacaacccctcctgtgctggactctgatggctcattcttcctgtacagcaagctg |
| | actgtggacaagtccagatggcagcaggggaatgtgttcagctgctctgtgatgcatgag |
| | gccctgcacaaccactacacccagaaaagtctgagtctgagccctggcaag |
| Adalimumab | gctccagaactgcttggaggcccttctgtgttcctgtttcctccaaagcctaaggacacc |
| Light Chain | ctgatgatcagcagaacccctgaagtgacctgtgtggtggttgatgtgtcccatgaggac |
| (kappa) | ccagaagtgaagttcaattggtatgtggatggggttgaagtgcacaatgctaagaccaag |
| SEQ ID NO: 448 | cctagagaggaacagtacaacagcacctacagagtggtgtctgtgctgacagtgctgcat |
| | caggactggctgaatggcaaagagtacaagtgcaaagtgtccaacaaggccctgcctgct |
| | cctattgagaaaaccatctccaaggccaagggccagccaagagaaccccaggtttacaca |
| | ctgccacctagcagagatgagctgaccaagaaccaggtgtccctgacctgcctggttaag |
| | ggcttctacccctctgacattgctgtggaatgggagagcaatggccagcctgagaacaac |
| | tacaagacaacccctcctgtgctggactctgatggctcattcttcctgtacagcaagctg |
| | actgtggacaagtccagatggcagcaggggaatgtgttcagctgctctgtgatgcatgag |
| | gccctgcacaaccactacacccagaaaagtctgagtctgagccctggcaag |
| Adalimumab VL | Gacatccagatgacacagagccctagcagcctgtctgcttctgtgggagacagagtgacc |
| SEQ ID NO: 449 | atcacatgcagagccagccagggaatcagaaactacctggcctggtatcagcaaaagcct |
| | ggcaaggcccctaagctgctgatctatgcagccagcacactgcagtcaggggtgccaagc |
| | agattttcaggctctggctctggcacagacttcaccctgaccatttctagcctgcagcct |
| | gaggatgtggccacctactactgccagagatacaacagagccccatacacctttggacag |
| | ggcacaaaggtggaaatcaag |
| | CDRs are underlined. |
| Adalimumab | agaacagttgcagcaccctcagttttcatcttccccccctcagatgaacagctgaagtct |
| Light chain C- | ggcactgcctctgttgtgtgcctgctgaacaacttctaccccagagaagccaaggtgcag |
| Domain (CL) | tggaaggttgacaatgccctgcagtcaggcaacagccaagaatctgtgactgaacaggat |
| SEQ ID NO: 450 | tccaaggatagcacctacagcctgagcagcaccctgacactgagcaaggctgactatgag |
| | aagcacaaagtgtatgcctgtgaagtgacccaccagggactgagcagcccagtgaccaag |
| | agcttcaacaggggagagtgctga |

[1420] Plasmid expression was characterized via western blot following transfection into 293T cells (FIG. 36A). In addition, plasmid-expressed antibody activity was assessed via ELISA for binding of recombinant human TNFα (FIG. 36B). In addition, this plasmid was used to produce recombinant AAV8 vectors. Expression and activity of adalimumab produced from AAV8 was evaluated with the aforementioned assays (FIGS. 37A-37C).

### 6.63 Example 63: Self-Complementary Adalimumab Fab Transgene Cassettes: Design and Characterization

[1421] Two self-complementary AAV (scAAV) transgene cassettes encoding vectorized adalimumab Fab were generated. The transgenes are driven by the ubiquitous mU1a (SEQ ID NO: 414) or EF-1α (SEQ ID NO: 415) core promoters. These plasmids were compared for Fab expression via transfection into 293T cells (FIG. 38). The mU1a-driven vector displayed a higher absorbance values suggesting higher Fab concentration within the cell supernatant.

### 6.64 Example 64: TNFα Binding Across Model Species with Vectorized Adalimumab IgG and Fab

[1422] Vectorized adalimumab candidates for TNFα isolated from model species including human, mouse, and rat were tested for their binding capacity. Vectorized antibodies were expressed and secreted into cell supernatant following cis plasmid transfection into 293T cells. The cell supernatant was tested in an ELISA where the plates were coated with recombinant TNFα derived from the aforementioned species (FIG. 39). Adalimumab IgG effectively bound human and mouse derived TNFα. The Fab demonstrates a similar binding profile to human TNFα as the IgG. However, the Fab displays poor binding to mouse TNFα compared to adalimumab IgG. Both IgG and Fab display far reduced binding to rat TNFα.

### 6.65 Example 65: AAV-Mediated Ocular Gene Therapy for Non-Infectious Posterior Uveitis

[1423] Non-infectious posterior uveitis is a form of ocular inflammation that affects the retina and choroid of the eye and leads to blindness. It afflicts approximately 38,000 Americans per year. Patients are usually treated with systemic steroids or corticosteroids therapy, which results in high risks of systemic complications. In 2016, Humira (adalimumab), a human monoclonal antibody that targets tumor necrosis factor-alpha (TNFα), was approved by FDA and became the only systemic noncorticosteroid agent for the treatment of non-infectious uveitis (NIU) and has been widely used since then. In this study, full length or Fab adalimumab antibody in an adeno-associated virus (AAV) vector, such as AAV8.CAG.adalimumab.IgG, or AAV8.CAG.adalimumab.Fab, as well as AAV8.CAG.GFP, will be evaluated for AAV-mediated antibody expression in vivo in mouse ocular tissues via local administration. AAV8.NUL will serve as a control vector. Efficacy studies in rodent EAU model will also be performed to investigate therapeutic potential of AAV-mediated anti-TNFα treatment for NIU.

[1424] Vectorized adalimumab sequence have been constructed and tested in vitro. The transduction efficiency and cell type specificity in wild type mouse will further be evaluated. Young adult C57BL/6 and B10.RIII mice (8-10 weeks old) will be used for this study. Vectors including AAV8.CAG.adalimumab.IgG, AAV8.CAG.adalimumab.Fab, AAV8.CAG.GFP and AAV8.NUL will be delivered in mouse eyes via subretinal (SR) injection at different doses (1×10⁷, 1×10⁸ and 1×10⁹ vg/eye) in 1 μl of formulation buffer. Fundus and OCT imaging will be performed at 1, 2 and 4 weeks after SR injection. Ocular samples will be collected at 5 weeks post administration. Levels of antibody or fusion protein expression in ocular tissues will be quantified by ELISA. Cell type specificity will be determined by immunofluorescent staining with various retinal cell markers. Test vector(s) will be selected for efficacy study. Different routes of administration (ROA) including suprachoroidal, intracameral and intravitreal injections will also be explored. The preferred ROA will be used for efficacy study.

[1425] Efficacy studies will be conducted by inducing experimental autoimmune uveitis (EAU) in B10.RIII mice by immunization with the human IRBP peptide. T-cell mediated ocular autoimmune response will occur in this model with a peak from approximately 11 to 18 days post-induction. Test vector will be administrated in mouse eye via preferred ROA at 2 weeks before or 1 week after induction of EAU. Contralateral eye will be delivered with AAV.NUL vector and serve as a control. Fundus and OCT imaging, electroretinography (ERG) and Optokinetic nystagmus (OKN) will be tested at 10, 17 and 30 days following induction of EAU to monitor the progress of the disease. Ocular tissues or whole eyeballs will be collected at 5 weeks post EAU induction. Levels of antibody or fusion protein expression in ocular tissues will be detected and quantified by ELISA. Retina structure changes and neuron survival will be evaluated by histology and immunofluorescent staining.

### EQUIVALENTS

[1426] Although the invention is described in detail with reference to specific embodiments thereof, it will be understood that variations which are functionally equivalent are within the scope of this invention. Indeed, various modifications of the invention in addition to those shown and described herein will become apparent to those skilled in the art from the foregoing description and accompanying drawings. Such modifications are intended to fall within the scope of the appended claims. Those skilled in the art will recognize or be able to ascertain using no more than routine experimentation, many equivalents to the specific embodiments of the invention described herein. Such equivalents are intended to be encompassed by the following claims.

[1427] All publications, patents and patent applications mentioned in this specification are herein incorporated by reference into the specification to the same extent as if each individual publication, patent or patent application was specifically and individually indicated to be incorporated herein by reference in their entireties.

What is claimed is:

1. A pharmaceutical composition for treating angioedema including hereditary angioedema in a human subject in need thereof, comprising an AAV vector comprising:
(a) a viral capsid that is at least 95% identical to the amino acid sequence of AAV8 capsid (SEQ ID NO: 143); AAVrh10 capsid (SEQ ID NO: 145); or AAV9 capsid (SEQ ID NO: 144); and
(b) an artificial genome comprising an expression cassette flanked by AAV ITRs wherein the expression cassette comprises a transgene encoding a full-length or substantially full-length anti-kallikrein (anti-pKal) mAb, or an antigen-binding fragment thereof, operably linked to one or more regulatory sequences that control expression of the transgene in human liver cells or human muscle cells;
wherein said AAV vector is formulated for administration to the subject, optionally wherein administration is intravenous, subcutaneous, intranasal, or intramuscular.

2. The pharmaceutical composition of claim 2, wherein the anti-pKal mAb is lanadelumab.

3. A pharmaceutical composition for delivering lanadelumab to the bloodstream to treat hereditary angioedema in a human subject in need thereof, said composition comprising a recombinant AAV comprising a transgene encoding lanadelumab operably linked to one or more regulatory sequences that control expression of the transgene in muscle and/or liver cells, wherein said recombinant AAV is administered to said human subject at a dose sufficient to result in expression from the transgene and secretion of lanadelumab into the bloodstream of the human subject to produce lanadelumab plasma levels of at least 5 μg/ml to at least 35 μg/ml lanadelumab in said subject.

4. The method of claim 3, wherein the lanadelumab plasma levels are 20 μg/ml to 35 μg/ml and the lanadelumab plasma levels are maintained for at least three months.

5. The method of claim 3 or 4 wherein the lanadelumab antibody secreted into the plasma exhibits greater a greater than at least 40%, 45%, 50%, 55%, 60%, 65% or 70 reduction in pKal activity as measured by a kinetic enzymatic functional assay wherein the activity of the lanadelumab antibody is measured at 2 weeks, 3 weeks, 4 weeks, 5 weeks, 6 weeks, 7 weeks, 8 weeks, 9 weeks, 10 weeks, 11 weeks or 12 weeks after said administration.

6. A pharmaceutical composition for delivery of an antibody or antigen binding fragment thereof to the bloodstream of a human subject in need thereof, comprising an AAV vector comprising:
(a) An AAV viral capsid that infects liver and/or muscle cells; and
(b) an artificial genome comprising an expression cassette flanked by AAV ITRs wherein the expression cassette comprises a transgene encoding a full-length antibody or an antigen-binding fragment thereof, operably linked to a chimeric promoter that directs expression in muscle and liver cells;
wherein said AAV vector is formulated for intramuscular administration.

7. The pharmaceutical composition of claim 6 wherein the chimeric promoter is LMTP6 (SEQ ID NO: 320), LMTP13 (SEQ ID NO: 321), LMTP14 (SEQ ID NO: 322), LMTP15 (SEQ ID NO: 323), LMTP18 (SEQ ID NO: 324), LMTP19 (SEQ ID NO: 325), or LMTP20 (SEQ ID NO: 326).

8. A pharmaceutical composition for treating non-infectious uveitis in a human subject in need thereof, comprising an AAV vector comprising:
(a) a viral capsid that is at least 95% identical to the amino acid sequence of an AAV2.7m8 (SEQ ID NO: 142), an AAV8 capsid (SEQ ID NO: 143), or AAV9 capsid (SEQ ID NO: 144); and
(b) an artificial genome comprising an expression cassette flanked by AAV ITRs wherein the expression cassette comprises a transgene encoding a substantially full-length or full-length anti-tumor necrosis factor-alpha (anti-TNFα) mAb or an antigen-binding fragment thereof, a substantially full-length or full-length anti-complement component 5 (C5) mAb or an antigen-binding fragment thereof, a substantially full-length or full-length anti-interleukin-6 (IL-6) mAb or an antigen-binding fragment thereof, or a substantially full-length or full-length anti-interleukin-6 receptor (IL-6R) mAb or an antigen-binding fragment thereof, operably linked to one or more regulatory sequences that control expression of the transgene in human retina cells;
wherein said AAV vector is formulated for subretinal, intravitreal, intranasal, or suprachoroidal administration to the subject.

9. The pharmaceutical composition of claim 8 wherein the anti-TNFα mAb is adalimumab, infliximab or golimumab; the anti-C5 mAb is tesidolumab or ravulizumab; the anti-IL-6 mAb is siltuximab, clazakimzumab, sirukumab, olokizumab or gerilimzumab; or the anti-IL-6R mAb is satralizumab, sarilumab or tocilizumab.

10. A pharmaceutical composition for treating Alzheimer's disease, frontotemporal dementia (FD), tauopathies, progressive supranuclear palsy, chronic traumatic encephalopathy, Pick's Complex, and primary age-related tauopathy, Huntington's disease, juvenile Huntington's disease, Parkinson's disease, synucleinopathies, ALS, migraines, or cluster headaches in a human subject in need thereof, comprising an adeno-associated virus (AAV) vector having:
(a) a viral capsid that is at least 95% identical to the amino acid sequence of an AAV8 capsid (SEQ ID NO: 143), AAV9 capsid (SEQ ID NO: 144), AAVrh10 capsid (SEQ ID NO: 145), an AAVrh20 capsid, an AAVrh39 capsid or an AAVcy5 capsid; and
(b) an artificial genome comprising an expression cassette flanked by AAV inverted terminal repeats (ITRs), wherein the expression cassette comprises a transgene encoding a full-length or substantially full-length anti-amyloid beta (anti-Aβ), anti-sortilin, anti-Tau protein (anti-Tau), anti-semaphorin 4D (anti-SEMA4D), anti-alpha synuclein (anti-SNCA), anti-superoxide dismutase-1 (anti-SOD1) or anti-calcitonin gene-related peptide receptor (anti-CGRPR) mAb, or an antigen-binding fragment thereof, operably linked to one or more regulatory sequences that control expression of the transgene in human CNS, muscle, or liver cells;
wherein said AAV vector is formulated for administration to the subject, optionally wherein administration is intrathecal, intravenous, subcutaneous, intranasal, or intramuscular.

11. The pharmaceutical composition of claim 10, wherein the anti-Aβ mAb is solanezumab, lecanemab, or GSK933776; the anti-sortilin mAb is AL-001; the anti-Tau mAb is ABBV-8E12, UCB-0107, or NI-105 (BIIB076); the anti-SEMA4D mAb is VX15/2503; the anti-SNCA mAb is prasinezumab, NI-202 (BIIB054), or MED-1341; the anti-SOD1 mAb is NI-2041.10D12 or NI-204.12G7; and the anti-CGRPR mAb is eptinezumab, fremanezumab, or galcanezumab.

12. A pharmaceutical composition for treating retinal disorders including diabetic retinopathy, myopic choroidal neovascularization (mCNV), macular degeneration (e.g., neovascular (wet) or dry age-related macular degeneration (nAMD)), macular edema (e.g., macular edema following a retinal vein occlusion (RVO) or diabetic macular edema (DME)), retinal vein occlusion, diabetic retinopathy (DR), non-infectious uveitis, or glaucoma, or abnormal vascularization of the retina in a human subject in need thereof, comprising an AAV vector comprising:
(a) a viral capsid that is at least 95% identical to the amino acid sequence of an AAV2.7m8 capsid (142), an AAV8 capsid (SEQ ID NO: 143), or an AAV9 capsid (SEQ ID NO: 144); and
(b) an artificial genome comprising an expression cassette flanked by AAV ITRs wherein the expression cassette comprises a transgene encoding a full-length or substantially full-length anti-vascular endothelial growth factor (anti-VEGF), anti-erythropoietin receptor (anti-EPOR), anti-Aβ, anti-activin receptor like kinase 1 (anti-ALK1), anti-complement component 5 (anti-C5), anti-endoglin (anti-ENG), anti-complement component 1Q (anti-CC1Q), anti-tumor necrosis factor-alpha (anti-TNFα), or anti-pKal mAb or an antigen-binding fragment thereof, operably linked to one or more regulatory sequences that control expression of the transgene in human retinal cells;
wherein said AAV vector is formulated for subretinal, intravitreal, suprachoroidal, or intranasal administration to said subject.

13. The pharmaceutical composition of claim 12 wherein the anti-VEGF mAb is sevacizumab; anti-EPOR mAb is LKA-651 (NSV2) or LKA-651 (NSV3); anti-Aβ mAb is solanezumab, lecanemab, or GSK933776; anti-ALK1 mAb is ascrinvacumab; anti-C5 mAb is tesidolumab or ravulizumab; anti-ENG mAb is carotuximab; the anti-CC1Q mAb is ANX-007; wherein anti-TNFα mAb is adalimumab, infliximab or golimumab; and the anti-pKal mAb is lanadelumab.

14. A pharmaceutical composition for treating multiple sclerosis in a human subject in need thereof, comprising an AAV vector comprising:
(a) a viral capsid that is at least 95% identical to the amino acid sequence of an AAV8 capsid (SEQ ID NO: 143), AAV9 capsid (SEQ ID NO: 144), AAVrh10 capsid (SEQ ID NO: 145), an AAVrh20 capsid, an AAVrh39 capsid or an AAVcy5 capsid; and
(b) an artificial genome comprising an expression cassette flanked by AAV ITRs wherein the expression cassette comprises a transgene encoding a full-length or substantially full-length anti-repulsive guidance molecule-A (anti-RGMa) mAb, or an antigen-binding fragment thereof, operably linked to one or more regulatory sequences that control expression of the transgene in human CNS, liver, or muscle cells;
wherein said AAV vector is formulated for administration to the subject, optionally wherein administration is intrathecal, intravenous, subcutaneous, intranasal, or intramuscular.

15. The pharmaceutical composition of claim 14, wherein the anti-RGMa mAb is elezanumab.

16. A pharmaceutical composition for treating amyloidosis (ATTR), familial amyloid cardiomyopathy (FAC), or familial amyloid polyneuropathy (FAP) in a human subject in need thereof, comprising AAV vector comprising:
(c) a viral capsid that is at least 95% identical to the amino acid sequence of an AAV8 capsid (SEQ ID NO: 143), an AAV9 capsid (SEQ ID NO: 144), an AAVrh10 capsid (SEQ ID NO: 145), an AAVrh20 capsid, an AAVrh39 capsid, or an AAVcy5 capsid; and
(a) an artificial genome comprising an expression cassette flanked by AAV ITRs wherein the expression cassette comprises a transgene encoding a full-length or substantially full-length anti-TTR mAb, or an antigen-binding fragment thereof, operably linked to one or more regulatory sequences that control expression of the transgene in human liver cells or human muscle cells;
wherein said AAV vector is formulated for administration to the subject, optionally wherein administration is intravenous, subcutaneous, intranasal, or intramuscular.

17. The pharmaceutical composition of claim 16, wherein the anti-TTR mAb is NI-301 or PRX-004.

18. A pharmaceutical composition for treating fibrotic disorders, pulmonary fibrosis, cystic fibrosis (CF), idiopathic pulmonary fibrosis (IPF), liver cirrhosis, atrial fibrosis, endomyocardial fibrosis, old myocardial infarction, arthrofibrosis, Crohn's disease, ulcerative colitis, mediastinal fibrosis, myelofibrosis (MF), nephrogenic systemic fibrosis (NSF), progressive massive fibrosis (PMF), and retroperitoneal fibrosis (RPF) in a human subject in need thereof, comprising an AAV vector comprising:
(c) a viral capsid that is at least 95% identical to the amino acid sequence of an AAV8 capsid (SEQ ID NO: 143), an AAV9 capsid (SEQ ID NO: 144), or AAVrh10 (SEQ ID NO: 145); and
(d) an artificial genome comprising an expression cassette flanked by AAV ITRs wherein the expression cassette comprises a transgene encoding a full-length or substantially full-length anti-connective tissue growth factor (anti-CTGF) mAb, or an antigen-binding fragment thereof, operably linked to one or more regulatory sequences that control expression of the transgene in human liver cells or human muscle cells;
wherein said AAV vector is formulated for administration to said subject, optionally wherein administration is intravenous, subcutaneous, intranasal, or intramuscular.

19. The pharmaceutical composition of claim 18, wherein the anti-CTGF mAb is pamrevlumab.

20. A pharmaceutical composition for treating non-infectious uveitis, neuromyelitis optica (NMO), diabetic retinopathy (DR), or diabetic macular edema (DME) in a human subject in need thereof, comprising an AAV vector comprising:
(a) a viral capsid that is at least 95% identical to the amino acid sequence of an AAV8 capsid (SEQ ID NO: 143), an AAV2.7m8 capsid (SEQ ID NO: 142) or an AAV9 capsid (SEQ ID NO: 144); and
(b) an artificial genome comprising an expression cassette flanked by AAV inverted terminal repeats (ITRs) wherein the expression cassette comprises a transgene encoding a full-length or substantially full-length anti-interleukin-6 receptor (anti-IL6R), anti-interleukin 6 (IL6), or anti-cluster of differentiation 19 (anti-CD19) mAb, or an antigen-binding fragment thereof, operably linked to one or more regulatory sequences that control expression of the transgene in human retinal cells;
wherein said AAV vector is formulated for administration to said subject, optionally wherein administration is intranasal, subretinal, intravitreal, or suprachoroidal.

21. The pharmaceutical composition of claim 20, wherein the anti-IL6R mAb is satralizumab, sarilumab, or tocilizumab, or the anti-IL6 mAb is siltuximab, clazakizumab, sirukumab, olokizumab, or gerilimzumab, or the anti-CD19 mAb is inebilizumab.

22. A pharmaceutical composition for reducing, inhibiting or ameliorating a detrimental immune response in a human subject in need thereof, comprising an AAV vector comprising:
(a) a viral capsid that is at least 95% identical to the amino acid sequence of an AAV8 capsid (SEQ ID NO: 143), an AAV9 capsid (SEQ ID NO: 144), an AAVrh10 capsid (SEQ ID NO: 145); and
(b) an artificial genome comprising an expression cassette flanked by AAV ITRs wherein the expression cassette comprises a transgene encoding a substantially full-length or full-length mAb of an anti-interleukin-6 receptor (anti-IL6R) or anti-interleukin-6 (IL6), or an antigen-binding fragment thereof, operably linked to one or more regulatory sequences that control expression of the transgene in human liver cells or muscle cells;
wherein said AAV vector is formulated for subcutaneous, intramuscular, intravenous or pulmonary administration to the subject.

23. The pharmaceutical composition of claim 22, wherein the anti-IL6R mAb is satralizumab, sarilumab, or tocilizumab, or the anti-IL6 mAb is siltuximab, clazakizumab, sirukumab, olokizumab, or gerilimzumab.

24. A pharmaceutical composition for treating inflammatory bowel disease (IBD) including UC and CD in a human subject in need thereof, comprising an AAV vector comprising:
(a) a viral capsid that is at least 95% identical to the amino acid sequence of AAV8 capsid (SEQ ID NO: 143); AAV9 capsid (SEQ ID NO: 144); or AAVrh10 capsid (SEQ ID NO: 145); and
(b) an artificial genome comprising an expression cassette flanked by AAV ITRs wherein the expression cassette comprises a transgene encoding a full-length or substantially full-length anti-integrin β7 subunit (anti-ITGB7) mAb, or an antigen-binding fragment thereof, operably linked to one or more regulatory sequences that control expression of the transgene in human liver cells or human muscle cells;
wherein said AAV vector is formulated for administration to the subject, optionally wherein administration is intravenous, subcutaneous, intranasal, or intramuscular.

25. The pharmaceutical composition of claim 24, wherein the anti-ITGB7 mAb is etrolizumab.

26. A pharmaceutical composition for treating osteoporosis or abnormal bone loss or weakness (e.g., treating giant cell tumor of bone, treating treatment-induced bone loss, slowing the loss of (or increasing) bone mass in breast and prostate cancer patients, preventing skeletal-related events due to bone metastasis, or for decreasing bone resorption and turnover in a human subject in need thereof, comprising an AAV vector comprising:
(a) a viral capsid that is at least 95% identical to the amino acid sequence of an AAV8 capsid (SEQ ID NO: 143); AAVrh10 capsid (SEQ ID NO: 145); or an AAV9 capsid (SEQ ID NO: 144);
(b) an artificial genome comprising an expression cassette flanked by AAV ITRs wherein the expression cassette comprises a transgene encoding a full-length or substantially full-length anti-sclerostin (anti-SOST) mAb, or an antigen-binding fragment thereof, operably linked to one or more regulatory sequences that control expression of the transgene in human liver cells or human muscle cells;
wherein said AAV vector is formulated for administration to the subject, optionally wherein administration is intravenous, subcutaneous, intranasal, or intramuscular.

27. The pharmaceutical composition of claim 26, wherein the anti-SOST mAb is romosozumab.

28. A pharmaceutical composition for treating atopic dermatitis in a human subject in need thereof, comprising an AAV vector comprising:
(a) a viral capsid that is at least 95% identical to the amino acid sequence of an AAV8 capsid (SEQ ID NO: 143) or AAV9 capsid (SEQ ID NO: 144); and
(b) an artificial genome comprising an expression cassette flanked by AAV ITRs wherein the expression cassette comprises a transgene encoding an anti-IL13 mAb or anti-IL31RA, or an antigen-binding fragment thereof, operably linked to one or more regulatory sequences that control expression of the transgene in human liver cells or human muscle cells;
wherein said AAV vector is formulated for intravenous administration to the liver or muscle of said subject.

29. The pharmaceutical composition of claim 28 wherein the anti-IL13 or the IL31RA is tralokinumab or nemolizumab.

30. A pharmaceutical composition for treating eosinophilic asthma in a human subject in need thereof, comprising an AAV vector comprising:
(a) a viral capsid that is at least 95% identical to the amino acid sequence of an AAV8 capsid (SEQ ID NO: 143) or an AAV9 capsid (SEQ ID NO: 144); and
(b) an artificial genome comprising an expression cassette flanked by AAV ITRs wherein the expression cassette comprises a transgene encoding an anti-IL5R mAb or anti-IgE mAb, or an antigen-binding fragment thereof, operably linked to one or more regulatory sequences that control expression of the transgene in human liver cells or human muscle cells;
wherein said AAV vector is formulated for intravenous administration to the liver or muscle of said subject.

31. The pharmaceutical composition of claim 30 wherein the anti-IL5R or anti-IgE mAb is reslizumab or omalizumab.

32. A pharmaceutical composition for treating asthma or chronic obstructive pulmonary disease (COPD) in a human subject in need thereof, comprising an AAV vector comprising:
(a) a viral capsid that is at least 95% identical to the amino acid sequence of an AAV8 capsid (SEQ ID NO: 143) or an AAV9 capsid (SEQ ID NO: 144); and
(b) an artificial genome comprising an expression cassette flanked by AAV ITRs wherein the expression cassette comprises a transgene encoding an anti-IL5, anti-IL-5R, anti-IgE, or anti-TSLP mAb, or an antigen-binding fragment thereof, operably linked to one or more regulatory sequences that control expression of the transgene in human liver cells or human muscle cells;
wherein said AAV vector is formulated for intravenous administration to the liver or muscle of said subject.

33. The pharmaceutical composition of claim 32 wherein the anti-IL-5, anti-IL5R, anti-IgE, or anti-TSLP mAb is benralizumab, reslizumab, omalizumab, or tezepelumab.

34. A pharmaceutical composition for treating chronic idiopathic urticaria in a human subject in need thereof, comprising an AAV vector comprising:
(a) a viral capsid that is at least 95% identical to the amino acid sequence of an AAV8 capsid (SEQ ID NO:143) or an AAV9 capsid (SEQ ID NO: 144); and
(b) an artificial genome comprising an expression cassette flanked by AAV ITRs wherein the expression cassette comprises a transgene encoding an anti-IgE mAb, or an antigen-binding fragment thereof, operably linked to one or more regulatory sequences that control expression of the transgene in human liver cells or human muscle cells;
wherein said AAV vector is formulated for intravenous administration to the liver or muscle of said subject.

35. The pharmaceutical composition of claim 34, wherein the anti-IgE mAb is omalizumab.

36. A pharmaceutical composition for treating myasthenia gravis in a human subject in need thereof, comprising an AAV vector comprising:
(c) a viral capsid that is at least 95% identical to the amino acid sequence of an AAV8 capsid (SEQ ID NO: 143) or AAV9 capsid (SEQ ID NO: 144); and
(d) an artificial genome comprising an expression cassette flanked by AAV ITRs wherein the expression cassette comprises a transgene encoding an anti-C5 mAb, or an antigen-binding fragment thereof, operably linked to one or more regulatory sequences that control expression of the transgene in human liver cells or human muscle cells;
wherein said AAV vector is formulated for intravenous administration to the liver or muscle of said subject.

37. The pharmaceutical composition of claim 36 wherein the anti-C5 is ravulizumab.

38. A method of determining human anti-pKal antibody activity in a sample, said method comprising
a. Incubating the sample with activated human pKal;
b. Subsequently incubating the sample having been incubated with the activated human pKal with the synthetic substrate Pro-Phe-Arg-AMC
c. Measure the release of AMC over three hours as compared to a control sample.

The application's sequence listing, which the Patent Office published only in electronic form, follows.

SEQUENCE LISTING (454 sequences)

SEQ ID NO: 1 - protein, 237 aa, Artificial Sequence
  synthetic construct; antibody fragment
  SITE (1)..(237): Variant residues given in the sequence have no preference with respect to those in the annotations for variant positions
  SITE (217)..(237): This region may be absent in its entirety
  VARIANT (220)..(220): /replace="Leu"
  SITE (221)..(237): This region may be absent in its entirety
  SITE (227)..(237): This region may be absent in its entirety
EVQLVESGGGLVQPGGSLRLSCAASGFTFSRYSMSWVRQAPGKGLELVAQINSVGNSTYYPDTVKGRFTISRDNAKNTLYLQMNSLRAEDTAVYYCASGDYWGQGTLVTVSSASTKGPSVFPLAPSSKSTSGGTAALGCLVKDYFPEPVTVSWNSGALTSGVHTFPAVLQSSGLYSLSSVVTVPSSSLGTQTYICNVNHKPSNTKVDKKVEPKSCDKTHTCPPCPAPELLGGPSVFL

SEQ ID NO: 2 - protein, 219 aa, Artificial Sequence
  synthetic construct; antibody fragment
DVVMTQSPLSLPVTLGQPASISCRSSQSLIYSDGNAYLHWFLQKPGQSPRLLIYKVSNRFSGVPDRFSGSGSGTDFTLKISRVEAEDVGVYYCSQSTHVPWTFGQGTKVEIKRTVAAPSVFIFPPSDEQLKSGTASVVCLLNNFYPREAKVQWKVDNALQSGNSQESVTEQDSKDSTYSLSSTLTLSKADYEKHKVYACEVTHQGLSSPVTKSFNRGEC

SEQ ID NO: 3 - protein, 240 aa, Artificial Sequence
  synthetic construct; antibody fragment
  SITE (1)..(240): Variant residues given in the sequence have no preference with respect to those in the annotations for variant positions
  VARIANT (24)..(24): /replace="Val"
  SITE (220)..(240): This region may be absent in its entirety
  VARIANT (223)..(223): /replace="Leu"
  SITE (224)..(240): This region may be absent in its entirety
  SITE (230)..(240): This region may be absent in its entirety
EVQLVESGGGLVQPGGSLRLSCAASGFTFSDNGMAWVRQAPGKGLEWVSFISNLAYSIDYADTVTGRFTISRDNAKNSLYLQMNSLRAEDTAVYYCVSGTWFAYWGQGTLVTVSSASTKGPSVFPLAPSSKSTSGGTAALGCLVKDYFPEPVTVSWNSGALTSGVHTFPAVLQSSGLYSLSSVVTVPSSSLGTQTYICNVNHKPSNTKVDKKVEPKSCDKTHTCPPCPAPELAGAPSVFL

SEQ ID NO: 4 - protein, 219 aa, Artificial Sequence
  synthetic construct; antibody fragment
DIVMTQSPLSLPVTPGEPASISCRVSQSLLHSNGYTYLHWYLQKPGQSPQLLIYKVSNRFSGVPDRFSGSGSGTDFTLKISRVEAEDVGVYYCSQTRHVPYTFGGGTKVEIKRTVAAPSVFIFPPSDEQLKSGTASVVCLLNNFYPREAKVQWKVDNALQSGNSQESVTEQDSKDSTYSLSSTLTLSKADYEKHKVYACEVTHQGLSSPVTKSFNRGEC

SEQ ID NO: 5 - protein, 254 aa, Artificial Sequence
  synthetic construct; antibody fragment
  SITE (1)..(254): Variant residues given in the sequence have no preference with respect to those in the annotations for variant positions
  SITE (234)..(254): This region may be absent in its entirety
  VARIANT (237)..(237): /replace="Leu"
  SITE (238)..(254): This region may be absent in its entirety
  SITE (244)..(254): /note="This region may be absent in its entirety"
QVQLVQSGAEVKKPGASVKVSCKASGYTFTKYYMSWVRQAPGQGLEWMGIINPIGGSTSYAQKFQGRVTMTRDTSTSTVYMELSSLRSEDTAVYYCARDPSGIALAGPASRGYQGMDVWGQGTTVTVSSASTKGPSVFPLAPSSKSTSGGTAALGCLVKDYFPEPVTVSWNSGALTSGVHTFPAVLQSSGLYSLSSVVTVPSSSLGTQTYICNVNHKPSNTKVDKRVEPKSCDKTHTCPPCPAPELLGGPSVFL

SEQ ID NO: 6 - protein, 214 aa, Artificial Sequence
  synthetic construct; antibody fragment
EIVMTQSPATLSVSPGERATLSCRASQSVSSNLAWYQQKPGQAPRLLIYGASTRATGIPARFSGSGSGTEFTLTISSLQSEDFAVYYCQQARLGPWTFGGGTKVEIKRTVAAPSVFIFPPSDEQLKSGTASVVCLLNNFYPREAKVQWKVDNALQSGNSQESVTEQDSKDSTYSLSSTLTLSKADYEKHKVYACEVTHQGLSSPVTKSFNRGEC

SEQ ID NO: 7 - protein, 237 aa, Artificial Sequence
  synthetic construct; antibody fragment
  SITE (218)..(237): This region may be absent in its entirety
  VARIANT (223)..(223): /replace="Ser"
  SITE (227)..(237): This region may be absent in its entirety
EVKVVESGGGLVQPGGSMKLSCVVSGFTFSNYWVNWVRQAPGKGLEWVAQIRLKSDNYATHYEESVKGRFTISRDDSKSSVYLQMNNLRAEDSGIYYCTNWEDYWGQGTTVTVSSASTKGPSVFPLAPCSRSTSESTAALGCLVKDYFPEPVTVSWNSGALTSGVHTFPAVLQSSGLYSLSSVVTVPSSSLGTKTYTCNVDHKPSNTKVDKRVESKYGPPCPPCPAPEFLGGPSVFL

SEQ ID NO: 8 - protein, 218 aa, Artificial Sequence
  synthetic construct; antibody fragment
DIVLTQSPDSLAVSLGERATISCRASQSVSTSRYSYIHWYQQKPGQFPKLLIKYASNLESGVPSRFSGSGSGTDFTLNIHPLEPEDFATYYCHHSWEIPLTFGQGTKLEIKRTVAAPSVFIFPPSDEQLKSGTASVVCLLNNFYPREAKVQWKVDNALQSGNSQESVTEQDSKDSTYSLSSTLTLSKADYEKHKVYACEVTHQGLSSPVTKSFNRGEC

SEQ ID NO: 9 - protein, 240 aa, Artificial Sequence
  synthetic construct; antibody fragment
  VARIANT (61)..(61): /replace="Thr"
  SITE (221)..(240): This region may be absent in its entirety
  VARIANT (226)..(226): /replace="Ser"
  SITE (230)..(240): This region may be absent in its entirety
EVQLQESGPGLVKPSETLSLTCTVSGFSLTSNDIAWIRQPPGKGLEWMGTIWTDGSTNYNAAVQSRVTISVDTSKNQFSLKLSSVTAADTAVYYCARHRLYYGAFDYWGQGTMVTVSSASTKGPSVFPLAPCSRSTSESTAALGCLVKDYFPEPVTVSWNSGALTSGVHTFPAVLQSSGLYSLSSVVTVPSSSLGTKTYTCNVDHKPSNTKVDKRVESKYGPPCPPCPAPEFLGGPSVFL

SEQ ID NO: 10 - protein, 219 aa, Artificial Sequence
  synthetic construct; antibody fragment
DIVMTQTPLSLSVTPGQPASISCRSSQSLEYSDGYTYLEWYLQKPGQSPQLLIYEVSNRFSGVPDRFSGSGSGTDFTLKISRVEAEDVGVYYCFQATHNPYTFGQGTKLEIKRTVAAPSVFIFPPSDEQLKSGTASVVCLLNNFYPREAKVQWKVDNALQSGNSQESVTEQDSKDSTYSLSSTLTLSKADYEKHKVYACEVTHQGLSSPVTKSFNRGEC

SEQ ID NO: 11 - protein, 249 aa, Artificial Sequence
  synthetic construct; antibody fragment
  SITE (229)..(249): This region may be absent in its entirety
  VARIANT (232)..(232): /replace="Leu"
  SITE (233)..(249): This region may be absent in its entirety
  SITE (239)..(249): This region may be absent in its entirety
QVQLVESGGGVVQPGRSLRVSCAASGFTFSSYDMHWVRQAPGKGLEWVAVIWFDGSNEFYADSVKGRFTISRDNSKNTLFQMNSLRAEDTAVYYCARDLGASVTTSNAENFHHWGQGTLVTVSSASTKGPSVFPLAPSSKSTSGGTAALGCLVKDYFPEPVTVSWNSGALTSGVHTFPAVLQSSGLYSLSSVVTVPSSSLGTQTYICNVNHKPSNTKVDKKVEPKSCDKTHTCPPCPAPELAGAPSVFL

SEQ ID NO: 12 - protein, 213 aa, Artificial Sequence
  synthetic construct; antibody fragment
SYELTQPPSVSVSPGQTARITCSGDALPKRYVYWYQQKSGQAPVLVIYEDSKRPSGIPETFSGSSSGTMATLTISGAQVEDEADYYCYSTDSNGHHWVFGGGTKLTVLGQPKAAPSVTLFPPSSEELQANKATLVCLISDFYPGAVTVAWKADSSPVKAGVETTTPSKQSNNKYAASSYLSLTPEQWKSHRSYSCQVTHEGSTVEKTVAPTCS

SEQ ID NO: 13 - protein, 245 aa, Artificial Sequence
  synthetic construct; antibody fragment
  SITE (226)..(245): This region may be absent in its entirety
  VARIANT (231)..(231): /replace="Ser"
  SITE (235)..(245): This region may be absent in its entirety
QVQLVQSGAEVKKPGSSVKVSCKASGYSFSDYYMHWVRQAPGQGLEWMGQINPTTGGASYNQKFKGKATITVDKSTSTAYMELSSLRSEDTAVYYCARYYYGRHFDVWGQGTTVTVSSASTKGPSVFPLAPCSRSTSESTAALGCLVKDYFPEPVTVSWNSGALTSGVHTFPAVTVSSVLQSSGLYSLSSVVTVPSSSLGTKTYTCNVDHKPSNTKVDKRVESKYGPPCPPCPAPEFLGGPSVFL

SEQ ID NO: 14 - protein, 210 aa, Artificial Sequence
  synthetic construct; antibody fragment
DIVMTQSPDSLAVSLGERATINCKASQSVDYDGDSYMNWYQQKPGQPPKLLIYAASNLESGVPDRFSGSGSGTDFTLTISSLQAEDVAVYYCQQSNEDPYTFGQGTKLEIKFIFPPSDEQLKSGTASVVCLLNNFYPREAKVQWKVDNALQSGNSQESVTEQDSKDSTYSLSSTLTLSKADYEKHKVYACEVTHQGLSSPVTKSFNRGEC

SEQ ID NO: 15 - protein, 241 aa, Artificial Sequence
  synthetic construct; antibody fragment
  SITE (221)..(241): This region may be absent in its entirety
  VARIANT (224)..(224): /replace="Leu"
  SITE (225)..(241): This region may be absent in its entirety
  SITE (231)..(241): This region may be absent in its entirety
EVQLVESGGGLVQPGGSLRLSCAASGFTFSNYGMSWVRQAPGKGLEWVASISSGGGSTYYPDNVKGRFTISRDDAKNSLYLQMNSLRAEDTAVYYCARGGAGIDYWGQGTLVTVSSASTKGPSVFPLAPSSKSTSGGTAALGCLVKDYFPEPVTVSWNSGALTSGVHTFPAVLQSSGLYSLSSVVTVPSSSLGTQTYICNVNHKPSNTKVDKRVEPKSCDKTHTCPPCPAPELLGGPSVFL

SEQ ID NO: 16 - protein, 220 aa, Artificial Sequence
  synthetic construct; antibody fragment
DIQMTQSPSSLSASVGDRVTITCKSIQTLLYSSNQKNYLAWFQQKPGKAPKLLIYWASIRKSGVPSRFSGSGSGTDFTLTISSLQPEDLATYYCQQYYSYPLTFGGGTKLEIKRTVAAPSVFIFPPSDEQLKSGTASVVCLLNNFYPREAKVQWKVDNALQSGNSQESVTEQDSKDSTYSLSSTLTLSKADYEKHKVYACEVTHQGLSSPVTKSFNRGEC

SEQ ID NO: 17 - protein, 249 aa, Artificial Sequence
  synthetic construct; antibody fragment
  SITE (229)..(249): This region may be absent in its entirety
  VARIANT (232)..(232): /replace="Leu"
  SITE (233)..(249): This region may be absent in its entirety
  SITE (239)..(249): This region may be absent in its entirety
EVQLVESGAEVKKPGASVKVSCKASGYTFTNYAMHWVRQAPGQRLEWMGWINAGNGKRKYSQKFQDRVTINRDTSASTIYMELSSLGSEDTAVYYCAREEDHAGSGSYLSMDVWGQGTLVTVSSASTKGPSVFPLAPSSKSTSGGTAALGCLVKDYFPEPVTVSWNSGALTSGVHTFPAVLQSSGLYSLSSVVTVPSSSLGTQTYICNVNHKPSNTKVDKRVEPKSCDKTHTCPPCPAPELLGGPSVFL

SEQ ID NO: 18 - protein, 220 aa, Artificial Sequence; identical to SEQ ID NO: 16
  synthetic construct; antibody fragment

SEQ ID NO: 19 - protein, 247 aa, Artificial Sequence
  synthetic construct; antibody fragment
  SITE (227)..(247): /note="This region may be absent in its entirety"
  VARIANT (230)..(230): /replace="Leu"
  SITE (231)..(247): /note="This region may be absent in its entirety"
  SITE (237)..(247): This region may be absent in its entirety
EVQLLESGGGLVQPGGSLRLSCAASGFTFSSYAMSWVRQAPGKGLEWVSSISHLGGSTYYADSVKGRFTISRDNSKNTLYLQMNSLRAEDTAVYYCAGGANHGKYYYGMDKWGQGTTVTVSSASTKGPSVFPLAPSSKSTSGGTAALGCLVKDYFPEPVTVSWNSGALTSGVHTFPAVLQSSGLYSLSSVVTVPSSSLGTQTYICNVNHKPSNTKVDKRVEPKSCDKTHTCPPCPAPEFEGGPSVFL

SEQ ID NO: 20 - protein, 221 aa, Artificial Sequence
  synthetic construct; antibody fragment
QAVLTQPASLSASPGASASLTCTLRSGAPLPKYRIYWYQQKPGSPPQYLLRYKSDADKHQGSGVPSRFSGSKDASANAGILLISGLQSEDEADYYCMVWDHGVWYFGGGTKLTVLGQPKAAPSVTLFPPSSEELQANKATLVCLISDFYPGAVTVAWKADSSPVKAGVETTTPSKQSNNKYAASSYLSLTPEQWKSHRSYSCQVTHEGSTVEKTVAPTECS

SEQ ID NO: 21 - protein, 251 aa, Artificial Sequence
  synthetic construct; antibody fragment
  SITE (231)..(251): This region may be absent in its entirety
  VARIANT (234)..(234): /replace="Leu"
  SITE (235)..(251): This region may be absent in its entirety
  SITE (241)..(251): This region may be absent in its entirety
EVQLVESGGDLVRPGGSLRLSCVASGFTFSNYWMHWVRQAPGQRPVWVSRTNTDGRNTAYADYAKGRFTISRDNAKSTLYLQLNSLRAEDTAVYFCARLRRNVADQITHNYYMDVWGKGTLVTVSSASTKGPSVFPLAPSSKSTSGGTAALGCLVKDYFPEPVTVSWNSGALTSGVHTFPAVLQSSGLYSLSSVVTVPSSSLGTQTYICNVNHKPSNTKVDKKVEPKSCDKTHTCPPCPAPEAAGGPSVFL

SEQ ID NO: 22 - protein, 213 aa, Artificial Sequence
  synthetic construct; antibody fragment
DIQMTQSPSSLSASVGDRVTACRASQSVGTYLNWYQQKRGKAPKLLIFAASSLQSGVPSRFSGSGSGTDFTLTISSLQPEDFATYYCQQSYSSPPTFGQGTKVEIKRTVAAPSVFIFPPSDEQLKSGTASVVCLLNNFYPREAKVQWKVDNALQSGNSQESVTEQDSKDSTYSLSSTLTLSKADYEKHKVYACEVTHQGLSSPVTKSFNRGEC

SEQ ID NO: 23 - protein, 248 aa, Artificial Sequence
  synthetic construct; antibody fragment
  SITE (228)..(248): This region may be absent in its entirety
  VARIANT (231)..(231): /replace="Leu"
  SITE (232)..(248): This region may be absent in its entirety
  SITE (238)..(248): This region may be absent in its entirety
QVQLVQSGAEVKKPGASVTLSCKASGYTFTAYYIHWVRQAREQGLEWMGVINPSTGTTFYAQNFPDRVSVTRDTSTSTVFMELHNLKSEDTAVYYCARAISEHGSGSYSPYYWGQGTLVTVSSASTKGPSVFPLAPSSKSTSGGTAALGCLVKDYFPEPVTVSWNSGALTSGVHTFPAVLQSSGLYSLSSVVTVPSSSLGTQTYICNVNHKPSNTKVDKKVEPKSCDKTHTCPPCPAPEAAGGPSVFL

SEQ ID NO: 24 - protein, 213 aa, Artificial Sequence
  synthetic construct; antibody fragment
SYELTQPPSVSVSLGQMAAITCSGEALPKKYGYWYQQKPGQVPVLLIYRDVERPSGVPDRFSGSSSGTMVTLTISGVQAEDEADYYCLSADSSGTWVFGGGTKLTVLGQPKANPTVTLFPPSSEELQANKATLVCLISDFYPGAVTVAWKADGSPVKAGVETTKPSKQSNNKYAASSYLSLTPEQWKSHRSYSCQVTHEGSTVEKTVAPTECS

SEQ ID NO: 25 - protein, 236 aa, Artificial Sequence
  synthetic construct; antibody fragment
  SITE (216)..(236): This region may be absent in its entirety
  VARIANT (219)..(219): /replace="Leu"
  SITE (220)..(236): This region may be absent in its entirety
  SITE (226)..(236): This region may be absent in its entirety
EVQLVESGGGLVQPGGSLRLSCAVSGIDLSGYYMNWVRQAPGKGLEWVGVIGINGATYYASWAKGRFTISRDNSKTTVYLQMNSLRAEDTAVYFCARGDIWGQGTLVTVSSASTKGPSVFPLAPSSKSTSGGTAALGCLVKDYFPEPVTVSWNSGALTSGVHTFPAVLQSSGLYSLSSVVTVPSSSLGTQTYICNVNHKPSNTKVDARVEPKSCDKTHTCPPCPAPELLGGPSVTL

SEQ ID NO: 26 - protein, 219 aa, Artificial Sequence
  synthetic construct; antibody fragment
QVLTQSPSSLSASVGDRVTINCQASQSVYHNTYLAWYQQKPGKVPKQLIYDASTLASGVPSRFSGSGSGTDFTLTISSLQPEDVATYYCLGSYDCTNGDCFVFGGGTKVEIKRTVAAPSVFIFPPSDEQLKSGTASVVCLLNNFYPREAKVQWKVDNALQSGNSQESVTEQDSKDSTYSLSSTLTLSKADYEKHKVYACEVTHQGLSSPVTKSFNRGEC

SEQ ID NO: 27 - protein, 238 aa, Artificial Sequence
  synthetic construct; antibody fragment
  SITE (228)..(238): /note="This region may be absent in its entirety"
  SITE (234)..(238): This region may be absent in its entirety
EVQLVESGGGLVQPGGSLRLSCAASGFTFSNYWISWVRQAPGKGLEWVAEIRSESDASATHYAEAVKGRFTISRDNAKNSLYLQMNSLRAEDTAVYYCLAYFDYGLAIQNYWGQGTLVTVSSASTKGPSVFPLAPCSRSTSESTAALGCLVKDYFPEPVTVSWNSGALTSGVHTFPAVLQSSGLYSLSSVVTVPSSNFGTQTYTCNVDHKPSNTKVDKTVERKCCVECPPCPAPPVAG

SEQ ID NO: 28 - protein, 214 aa, Artificial Sequence
  synthetic construct; antibody fragment
EIVLTQSPATLSLSPGERATLSCKASKRVTTYVSWYQQKPGQAPRLLIYGASNRYLGIPARFSGSGSGTDFTLTISSLEPEDFAVYYCSQSYNYPYTFGQGTKLEIKRTVAAPSVFIFPPSDEQLKSGTASVVCLLNNFYPREAKVQWKVDNALQSGNSQESVTEQDSKDSTYSLSSTLTLSKADYEKHKVYACEVTHQGLSSPVTKSFNRGEC

SEQ ID NO: 29 - protein, 241 aa, Artificial Sequence
  synthetic construct; antibody fragment
  SITE (222)..(241): /note="This region may be absent in its entirety"
  SITE (222)..(241): This region may be absent in its entirety
  VARIANT (227)..(227): /replace="Ser"
  SITE (231)..(241): /note="This region may be absent in its entirety"
QVQLVQSGAEVKKPGSSVKVSCKASGYTFGNYWMQWVRQAPGQGLEWMGAIYEGTGKTVYIQKFADRVTITADKSTSTAYMELSSLRSEDTAVYYCARLSDYVSGFGYWGQGTTVTVSSASTKGPSVFPLAPCSRSTSESTAALGCLVKDYFPEPVTVSWNSGALTSGVHTFPAVLQSSGLYSLSSVVTVPSSSLGTKTYTCNVDHKPSNTKVDKRVESKYGPPCPPCPAPEAAGGPSVFL

SEQ ID NO: 30 - protein, 214 aa, Artificial Sequence
  synthetic construct; antibody fragment
DIQMTQSPSSLSASVGDRVTITCRASKDISKYLNWYQQKPGKAPKLLIYYTSGYHSGVPSRFSGSGSGTDFTLTISSLQPEDFATYYCQQGDALPPTFGGGTKVEIKRTVAAPSVFIFPPSDEQLKSGTASVVCLLNNFYPREAKVQWKVDNALQSGNSQESVTEQDSKDSTYSLSSTLTLSKADYEKHKVYACEVTHQGLSSPVTKSFNRGEC

SEQ ID NO: 31 - protein, 247 aa, Artificial Sequence
  synthetic construct; antibody fragment
  SITE (227)..(247): This region may be absent in its entirety
  VARIANT (230)..(230): /replace="Leu"
  SITE (231)..(247): /note="This region may be absent in its entirety"
  SITE (237)..(247): This region may be absent in its entirety
EVQLVESGGGLVKPGGSLRLSCAASGFSFSNNDVMCWVRQAPGKGLEWIGCIMTTDVVTEYANWAKSRFTVSRDSAKNSVYLQMNSLRAEDTAVYFCARDSVGSPLMSFDLWGPGTLVTVSSASTKGPSVFPLAPSSKSTSGGTAALGCLVKDYFPEPVTVSWNSGALTSGVHTFPAVLQSSGLYSLSSVVTVPSSSLGTQTYICNVNHKPSNTKVDKKVEPKSCDKTHTCPPCPAPELLGGPSVFL

SEQ ID NO: 32 - protein, 219 aa, Artificial Sequence
  synthetic construct; antibody fragment
DIQMTQSPSSLSASVGDRVTINCQASQSIYNNNELSWYQQKPGKPPKLLIYRASTLASGVPSRFSGSGSGTDFTLTISSLQPEDVATYYCGGYKSYSNDGNGFGGGTKVEIKRTVAAPSVFIFPPSDEQLKSGTASVVCLLNNFYPREAKVQWKVDNALQSGNSQESVTEQDSKDSTYSLSSTLTLSKADYEKHKVYACEVTHQGLSSPVTKSFNRGEC

SEQ ID NO: 33 - protein, 242 aa, Artificial Sequence
  synthetic construct; antibody fragment
  SITE (222)..(242): /note="This region may be absent in its entirety"
  VARIANT (225)..(225): /replace="Leu"
  SITE (232)..(242): This region may be absent in its entirety
EVQLVQSGAEVKKPGESLKISCKGSGYSFTSYWIGWVRQMPGKGLEWMGWIDPYRSEIRYSPSFQGQVTISADKSISTAYLQWSSLKASDTAMYYCARVSSEPFDSWGQGTLVTVSSASTKGPSVFPLAPSSKSTSGGTAALGCLVKDYFPEPVTVSWNSGALTSGVHTFPAVLQSSGLYSLSSVVTVPSSSLGTQTYICNVNHKPSNTKVDKRVEPKSCDKTHTCPPCPAPELLGGPSVFL

SEQ ID NO: 34 - protein, 213 aa, Artificial Sequence
  synthetic construct; antibody fragment
SYVLTQPPSVSVAPGKTARITCSGDKLGDHYAYWYQQKPGQAPVLVIYDDSKRPSGIPERFSGSNSGNTATLTISRVEAGDEADYYCATWTFEGDYVFGGGTKLTVLGQPKAAPSVTLFPPSSEELQANKATLVCLISDFYPGAVTVAWKADSSPVKAGVETTTPSKQSNNKYAASSYLSLTPEQWKSHRSYSCQVTHEGSTVEKTVAPTECS

SEQ ID NO: 35 - protein, 252 aa, Artificial Sequence
  synthetic construct; antibody fragment
  SITE (232)..(252): This region may be absent in its entirety
  VARIANT (235)..(235): /replace="Leu"
  SITE (236)..(252): This region may be absent in its entirety
  SITE (242)..(252): This region may be absent in its entirety
QVQLQQSGPGLVKPSQTLSLTCAISGDSVSSNTAAWNWIRQSPSRGLEWLGVIYYRSKWYNDYAVSVKSRITINPDTSKNQFSLQLNSVTPEDTAVYYCARSVPGGDPGLEHAFAYWGRGTLVTVSSASTKGPSVFPLAPSSKSTSGGTAALGCLVKDYFPEPVTVSWNSGALTSGVHTFPAVLQSSGLYSLSSVVTVPSSSLGTQTYICNVNHKPSNTKVDKRVEPKSCDKTHTCPPCPAPELLGGPSVFL

SEQ ID NO: 36 - protein, 213 aa, Artificial Sequence
  synthetic construct; antibody fragment
SYVLTQPPSVSVAPGKTARITCSGDNLGTYYVEWYQQKPGQAPVLVIYDDSDRPSGIPERFSGSNSGNTATLTISRVEAGDEADYYCASFASWSDSVFGGGTKLTVLGQPKAAPSVTLFPPSSEELQANKATLVCLISDFYPGAVTVAWKADSSPVKAGVETTTPSKQSNNKYAASSYLSLTPEQWKSHRSYSCQVTHEGSTVEKTVAPTECS

SEQ ID NO: 37 - protein, 234 aa, Artificial Sequence
  synthetic construct; antibody fragment
  SITE (224)..(234): This region may be absent in its entirety
  SITE (230)..(234): This region may be absent in its entirety
QVQLQESGPGLVKPSQTLSLTCTVSGGSISSGEYYWNWIRQHPGKGLEWIGYIYYSGSTYYNPSLKSRVTISVDTSKNQFSLKLSSVTAADTAVYYCARESVAGFDYWGQGTLVTVSSASTKGPSVFPLAPCSRSTSESTAALGCLVKDYFPEPVTVSWNSGALTSGVHTFPAVLQSSGLYSLSSVVTVPSSNFGTQTYTCNVDHKPSNTKVDKTVERKCCVECPPCPAPPVAG

SEQ ID NO: 38 - protein, 215 aa, Artificial Sequence
  synthetic construct; antibody fragment
EIVLTQSPGTLSLSPGERATLSCRASQSVSSSYLAWYQQKPGQAPRLLIYGTSSRATGIPDRFSGSGSGTDFTLTISRLEPEDFAVYYCQQYGSSPITFGQGTRLEIKRTVAAPSVFIFPPSDEQLKSGTASVVCLLNNFYPREAKVQWKVDNALQSGNSQESVTEQDSKDSTYSLSSTLTLSKADYEKHKVYACEVTHQGLSSPVTKSFNRGEC

SEQ ID NO: 39 - protein, 241 aa, Artificial Sequence
  synthetic construct; antibody fragment
  SITE (221)..(241): This region may be absent in its entirety
  VARIANT (224)..(224): /replace="Leu"
  SITE (225)..(241): This region may be absent in its entirety
  SITE (231)..(241): This region may be absent in its entirety
EVQLVQSGAEVKKPGSSVKVSCKASGGTFSSYAISWVRQAPGQGLEWMGGIGPFFGTANYAQKFQGRVTITADESTSTAYMELSSLRSEDTAVYYCARDTPYFDYWGQGTLVTVSSASTKGPSVFPLAPSSKSTSGGTAALGCLVKDYFPEPVTVSWNSGALTSGVHTFPAVLQSSGLYSLSSVVTVPSSSLGTQTYICNVNHKPSNTKVDKRVEPKSCDKTHTCPPCPAPEAAGGPSVFL

SEQ ID NO: 40 - protein, 214 aa, Artificial Sequence
  synthetic construct; antibody fragment
SYELTQPLSVSVALGQTARITCSGDSIPNYYVYWYQQKPGQAPVLVIYDDSNRPSGIPERFSGSNSGNTATLTISRAQAGDEADYYCQSFDSSLNAEVFGGGTKLTVLGQPKAAPSVTLFPPSSEELQANKATLVCLISDFYPGAVTVAWKADSSPVKAGVETTTPSKQSNNKYAASSYLSLTPEQWKSHRSYSCQVTHEGSTVEKTVAPTECS

SEQ ID NO: 41 - protein, 243 aa, Artificial Sequence
  synthetic construct; antibody fragment
  SITE (223)..(243): This region may be absent in its entirety
  VARIANT (226)..(226): /replace="Leu"
  SITE (227)..(243): This region may be absent in its entirety
  SITE (233)..(243): This region may be absent in its entirety
EVKLEESGGGLVQPGGSMKLSCAASGFTFSDAWMDWVRQSPEKGLEWVAEIRSKASNHATYYAESVKGRFTISRDDSKSSVYLQMNSLRAEDTGIYYCTRWRRFFDSWGQGTTLTVSSASTKGPSVFPLAPSSKSTSGGTAALGCLVKDYFPEPVTVSWNSGALTSGVHTFPAVLQSSGLYSLSSVVTVPSSSLGTQTYICNVNHKPSNTKVDKKVEPKSCDKTHTCPPCPAPELLGGPSVFL

SEQ ID NO: 42 - protein, 213 aa, Artificial Sequence
  synthetic construct; antibody fragment
QIVLSQSPAILSASPGEKVTMTCRASSSVSYMHWYQQKPGSSPKPWIYATSNLASGVPVRFSGSGSGTSYSLTISRVEAEDAATYYCQQWSSNPLTFGAGTKLELKRTVAAPSVFIFPPSDEQLKSGTASVVCLLNNFYPREAKVQWKVDNALQSGNSQESVTEQDSKDSTYSLSSTLTLSKADYEKHKVYACEVTHQGLSSPVTKSFNRGEC

SEQ ID NO: 43 - protein, 246 aa, Artificial Sequence
  synthetic construct; antibody fragment
  SITE (226)..(246): This region may be absent in its entirety
  VARIANT (229)..(229): /replace="Leu"
  SITE (230)..(246): This region may be absent in its entirety
  SITE (236)..(246): This region may be absent in its entirety
QVQLVQSGAELKKPGASVKVSCKSSGYHFTSYWMHWVKQAPGQGLEWIGVIHPNSGSINYNEKFESRVTITVDKSTSTAYMELSSLRSEDTAVYYCAGERDSTEVLPMDYWGQGTTVTVSSASTKGPSVFPLAPSSKSTSGGTAALGCLVKDYFPEPVTVSWNSGALTSGVHTFPAVLQSSGLYSLSSVVTVPSSSLGTQTYICNVNHKPSNTKVDKRVEPKSCDKTHTCPPCPAPELLGGPSVFL

SEQ ID NO: 44 - protein, 214 aa, Artificial Sequence
  synthetic construct; antibody fragment
DVQITQSPSSLSASLGERATINCRASKSINKYLAWYQQKPGKAPKLLIYSGSTLQSGIPARFSGSGSGTDFTLTISSLEPEDFAMYYCQQHNEYPLTFGQGTKLEIKRTVAAPSVFIFPPSDEQLKSGTASVVCLLNNFYPREAKVQWKVDNALQSGNSQESVTEQDSKDSTYSLSSTLTLSKADYEKHKVYACEVTHQGLSSPVTKSFNRGEC

SEQ ID NO: 45 - protein, 246 aa, Artificial Sequence
  synthetic construct; antibody fragment
  SITE (226)..(246): This region may be absent in its entirety
  VARIANT (229)..(229): /replace="Leu"
  SITE (230)..(246): This region may be absent in its entirety
  SITE (236)..(246): This region may be absent in its entirety
EVQLVESGGGLVQPGRSLRLSCAASGFTFDDYAMHWVRQAPGKGLEWVSAITWNSGHIDYADSVEGRFTISRDNAKNSLYLQMNSLRAEDTAVYYCAKVSYLSTASSLDYWGQGTLVTVSSASTKGPSVFPLAPSSKSTSGGTAALGCLVKDYFPEPVTVSWNSGALTSGVHTFPAVLQSSGLYSLSSVVTVPSSSLGTQTYICNVNHKPSNTKVDKKVEPKSCDKTHTCPPCPAPELLGGPSVFL

SEQ ID NO: 46 - protein, 214 aa, Artificial Sequence
  synthetic construct; antibody fragment
DIQMTQSPSSLSASVGDRVTITCRASQGIRNYLAWYQQKPGKAPKLLIYAASTLQSGVPSRFSGSGSGTDFTLTISSLQPEDVATYYCQRYNRAPYTFGQGTKVEIKRTVAAPSVFIFPPSDEQLKSGTASVVCLLNNFYPREAKVQWKVDNALQSGNSQESVTEQDSKDSTYSLSSTLTLSKADYEKHKVYACEVTHQGLSSPVTKSFNRGEC

SEQ ID NO: 47 - protein, 245 aa, Artificial Sequence
  synthetic construct; antibody fragment
  SITE (225)..(245): This region may be absent in its entirety
  VARIANT (228)..(228): /replace="Leu"
  SITE (229)..(245): This region may be absent in its entirety
  SITE (235)..(245): This region may be absent in its entirety
EVKLEESGGGLVQPGGSMKLSCVASGFIFSNHWMNWVRQSPEKGLEWVAEIRSKSINSATHYAESVKGRFTISRDDSKSAVYLQMTDLRTEDTGVYYCSRNYYGSTYDYWGQGTTLTVSSASTKGPSVFPLAPSSKSTSGGTAALGCLVKDYFPEPVTVSWNSGALTSGVHTFPAVLQSSGLYSLSSVVTVPSSSLGTQTYICNVNHKPSNTKVDKKVEPKSCDKTHTCPPCPAPELLGGPSVFL

SEQ ID NO: 48 - protein, 214 aa, Artificial Sequence
  synthetic construct; antibody fragment
DILLTQSPAILSVSPGERVSFSCRASQFVGSSIHWYQQRTNGSPRLLIKYASESMSGIPSRFSGSGSGTDFTLSINTVESEDIADYYCQQSHSWPFTFGSGTNLEVKRTVAAPSVFIFPPSDEQLKSGTASVVCLLNNFYPREAKVQWKVDNALQSGNSQESVTEQDSKDSTYSLSSTLTLSKADYEKHKVYACEVTHQGLSSPVTKSFNRGEC

SEQ ID NO: 49 - protein, 254 aa, Artificial Sequence
  synthetic construct; antibody fragment
  SITE (234)..(254): This region may be absent in its entirety
  VARIANT (237)..(237): /replace="Leu"
  SITE (238)..(254): This region may be absent in its entirety
  SITE (244)..(254): This region may be absent in its entirety
SKLQVQLVESGGGVVQPGRSLRLSCAASGFIFSSYAMHWVRQAPGNGLEWVAFMSYDGSNKKYADSVKGRFTISRDNSKNTLYLQMNSLRAEDTAVYYCARDRGIAAGGNYYYYGMDVWGQGTTVTVSSASTKGPSVFPLAPSSKSTSGGTAALGCLVKDYFPEPVTVSWNSGALTSGVHTFPAVLQSSGLYSLSSVVTVPSSSLGTQTYICNVNHKPSNTKVDKKVEPKSCDKTHTCPPCPAPELLGGPSVFL

SEQ ID NO: 50 - protein, 218 aa, Artificial Sequence
  synthetic construct; antibody fragment
AGSEIVLTQSPATLSLSPGERATLSCRASQSVYSYLAWYQQKPGQAPRLLIYDASNRATGIPARFSGSGSGTDFTLTISSLEPEDFAVYYCQQRSNWPPFTFGPGTKVDIKRTVAAPSVFIFPPSDEQLKSGTASVVCLLNNFYPREAKVQWKVDNALQSGNSQESVTEQDSKDSTYSLSSTLTLSKADYEKHKVYACEVTHQGLSSPVTKSFNRGEC

SEQ ID NO: 51 - protein, 245 aa, Artificial Sequence
  synthetic construct; antibody fragment
  SITE (225)..(245): This region may be absent in its entirety
  VARIANT (228)..(228): /replace="Leu"
  SITE (229)..(245): This region may be absent in its entirety
  SITE (235)..(245): This region may be absent in its entirety
EVQLVQSGAEVKKPGASVKVSCKASGYTFTSHGISWVRQAPGQGLDWMGWISPYSGNTNYAQKLQGRVTMTTDTSTSTAYMELSSLRSEDTAVYYCARVGSGPYYYMDVWGQGTLVTVSSASTKGPSVFPLAPSSKSTSGGTAALGCLVKDYFPEPVTVSWNSGALTSGVHTFPAVLQSSGLYSLSSVVTVPSSSLGTQTYICNVNHKPSNTKVDKKVEPKSCDKTHTCPPCPAPEAAGGPSVFL

SEQ ID NO: 52 - protein, 215 aa, Artificial Sequence
  synthetic construct; antibody fragment
QSALTQPRSVSGSPGQSVTISCTGTSSSVGDSIYVSWYQQHPGKAPKLMLYDVTKRPSGVPDRFSGSKSGNTASLTISGLQAEDEADYYCYSYAGTDTLFGGGTKVTVLGQPKAAPSVTLFPPSSEELQANKATLVCLISDFYPGAVTVAWKADSSPVKAGVETTTPSKQSNNKYAASSYLSLTPEQWKSHRSYSCQVTHEGSTVEKTVAPTECS

SEQ ID NO: 53 - protein, 245 aa, Artificial Sequence
  synthetic construct; antibody fragment
  SITE (225)..(245): This region may be absent in its entirety
  VARIANT (228)..(228): /replace="Leu"
  SITE (229)..(245): This region may be absent in its entirety
  SITE (235)..(245): This region may be absent in its entirety
QVQLQESGPGLVKPSETLSLTCSVSGGSIISRSSYWGWIRQPPGKGLEWIGGIYHSGNTYDNPSLKSRLTMSVDTSKNQFSLNLRSVTAADTAVYYCARIVPGGDAFDIWGQGTMVTVSSASTKGPSVFPLAPSSKSTSGGTAALGCLVKDYFPEPVTVSWNSGALTSGVHTFPAVLQSSGLYSLSSVVTVPSSSLGTQTYICNVNHKPSNTKVDKRVEPKSCDKTHTCPPCPAPELLGGPSVFL

SEQ ID NO: 54 - protein, 213 aa, Artificial Sequence; identical to SEQ ID NO: 22
  synthetic construct; antibody fragment

SEQ ID NO: 55 - protein, 242 aa, Artificial Sequence
  synthetic construct; antibody fragment
  SITE (222)..(242): This region may be absent in its entirety
  VARIANT (225)..(225): /replace="Leu"
  SITE (226)..(242): This region may be absent in its entirety
  SITE (232)..(242): This region may be absent in its entirety
EVQLVESGGGLIQPGGSLRLSCAASGFTFSNYAMSWVRQAPGKGLEWVSSISSGGSTYYPDSVKGRFTISRDNSKNTLYLQMNSLRAEDTAVYYCARYYYGQYFDFWGQGTLVTVSSASTKGPSVFPLAPSSKSTSGGTAALGCLVKDYFPEPVTVSWNSGALTSGVHTFPAVLQSSGLYSLSSVVTVPSSSLGTQTYICNVNHKPSNTKVDKRVEPKSCDKTHTCPPCPAPELLGGPSVFL

SEQ ID NO: 56 - protein, 214 aa, Artificial Sequence
  synthetic construct; antibody fragment
DIVMTQSPSSLSASVGDRVTITCKASQDVSTTVAWYQQKPGKAPKLLIYSASYRSTGVPSRFSGSGSGTDFTLTISSLQPEDFAVYYCQQHYSTPLTFGGGTKVEIKRTVAAPSVFIFPPSDEQLKSGTASVVCLLNNFYPREAKVQWKVDNALQSGNSQESVTEQDSKDSTYSLSSTLTLSKADYEKHKVYACEVTHQGLSSPVTKSFNRGEC

SEQ ID NO: 57 - protein, 241 aa, Artificial Sequence; identical to SEQ ID NO: 39
  synthetic construct; antibody fragment
  SITE (221)..(241): This region may be absent in its entirety
  VARIANT (224)..(224): /replace="Leu"
  SITE (225)..(241): This region may be absent in its entirety
  SITE (231)..(241): This region may be absent in its entirety

SEQ ID NO: 58 - protein, 214 aa, Artificial Sequence; identical to SEQ ID NO: 40
  synthetic construct; antibody fragment

SEQ ID NO: 59 - protein, 235 aa, Artificial Sequence
  synthetic construct; antibody fragment
  SITE (225)..(235): This region may be absent in its entirety
  SITE (231)..(235): This region may be absent in its entirety
QVQLQESGPGLVKPSETLSLTCAVSGHSISHDHAWSWVRQPPGEGLEWIGFISYSGITNYNPSLQGRVTISRDNSKNTLYLQMNSLRAEDTAVYYCARSLARTTAMDYWGEGTLVTVSSASTKGPSVFPLAPSSKSTSGGTAALGCLVKDYFPEPVTVSWNSGALTSGVHTFPAVLQSSGLYSLSSVVTVPSSNFGTQTYTCNVDHKPSNTKVDKTVERKSCVECPPCPAPPVAG

SEQ ID NO: 60 - protein, 214 aa, Artificial Sequence
  synthetic construct; antibody fragment
DIQMTQSPSSLSASVGDSVTITCQASTDISSHLNWYQQKPGKAPELLIYYGSHLLSGVPSRFSGSGSGTDFTFTISSLEAEDAATYYCGQGNRLPYTFGQGTKVEIERTVAAPSVFIFPPSDEQLKSGTASVVCLLNNFYPREAKVQWKVDNALQSGNSQESVTEQDSKDSTYSLSSTLTLSKADYEKHKVYACEVTHQGLSSPVTKSFNRGEC

SEQ ID NO: 61 - protein, 241 aa, Artificial Sequence
  synthetic construct; antibody fragment
  SITE (221)..(241): This region may be absent in its entirety
  VARIANT (224)..(224): /replace="Leu"
  SITE (225)..(241): This region may be absent in its entirety
  SITE (231)..(241): This region may be absent in its entirety
EVQLVESGGGLVQPGRSLRLSCAASRFTFDDYAMHWVRQAPGKGLEWVSGISWNSGRIGYADSVKGRFTISRDNAENSLFLQMNGLRAEDTALYYCAKGRDSFDIWGQGTMVTVSSASTKGPSVFPLAPSSKSTSGGTAALGCLVKDYFPEPVTVSWNSGALTSGVHTFPAVLQSSGLYSLSSVVTVPSSSLGTQTYICNVNHKPSNTKVDKKVEPKSCDKTHTCPPCPAPELLGGPSVFL

SEQ ID NO: 62 - protein, 214 aa, Artificial Sequence
  synthetic construct; antibody fragment
DIQMTQSPSSVSASVGDRVTITCRASQGISSWLAWYQQKPGKAPKLLIYGASSLESGVPSRFSGSGSGTDFTLTISSLQPEDFASYYCQQANSFPYTFGQGTKLEIKRTVAAPSVFIFPPSDEQLKSGTASVVCLLNNFYPREAKVQWKVDNALQSGNSQESVTEQDSKDSTYSLSSTLTLSKADYEKHKVYACEVTHQGLSSPVTKSFNRGEC

SEQ ID NO: 63 - protein, 246 aa, Artificial Sequence
  synthetic construct; antibody fragment
  SITE (226)..(246): This region may be absent in its entirety
  VARIANT (229)..(229): /replace="Leu"
  SITE (230)..(246): This region may be absent in its entirety
  SITE (236)..(246): This region may be absent in its entirety
EVQLVESGGGLVQPGGSLRLSCAASGFTFSSSWMNWVRQAPGKGLEWVGRIYPGDGDTNYNVKFKGRFTISRDDSKNSLYLQMNSLKTEDTAVYYCARSGFITTVRDFDYWGQGTLVTVSSASTKGPSVFPLAPSSKSTSGGTAALGCLVKDYFPEPVTVSWNSGALTSGVHTFPAVLQSSGLYSLSSVVTVPSSSLGTQTYICNVNHKPSNTKVDKRVEPKSCDKTHTCPPCPAPELLGGPSVFL

SEQ ID NO: 64 - protein, 218 aa, Artificial Sequence
  synthetic construct; antibody fragment
EIVLTQSPDFQSVTPKEKVTITCRASESVDTFGISFMNWFQQKPDQSPKLLIHEASNQGSGVPSRFSGSGSGTDFTLTINSLEAEDAATYYCQQSKEVPFTFGGGTKVEIKRTVAAPSVFIFPPSDEQLKSGTASVVCLLNNFYPREAKVQWKVDNALQSGNSQESVTEQDSKDSTYSLSSTLTLSKADYEKHKVYACEVTHQGLSSPVTKSFNRGEC

SEQ ID NO: 65 - protein, 242 aa, Artificial Sequence
  synthetic construct; antibody fragment
  SITE (222)..(242): /note="This region may be absent in its entirety"
  VARIANT (225)..(225): /replace="Leu"
  SITE (226)..(242): /note="This region may be absent in its entirety"
  SITE (232)..(242): This region may be absent in its entirety
EVQLVESGGGLVQPGGSLRLSCAASGFFITNNYWGWVRQAPGKGLEWVGYISYSGSTSYNPSLKSRFTISRDTSKNTFYLQMNSLRAEDTAVYYCARTGSSGYFDFWGQGTLVTVSSASTKGPSVFPLAPSSKSTSGGTAALGCLVKDYFPEPVTVSWNSGALTSGVHTFPAVLQSSGLYSLSSVVTVPSSSLGTQTYICNVNHKPSNTKVDKKVEPKSCDKTHTCPPCPAPELLGGPSVFL

SEQ ID NO: 66 - protein, 214 aa, Artificial Sequence
  synthetic construct; antibody fragment
DIQMTQSPSSLSASVGDRVTITCRASESVDDLLHWYQQKPGKAPKLLIKYASQSISGVPSRFSGSGSGTDFTLTISSLQPEDFATYYCQQGNSLPNTFGQGTKVEIKRTVAAPSVFIFPPSDEQLKSGTASVVCLLNNFYPREAKVQWKVDNALQSGNSQESVTEQDSKDSTYSLSSTLTLSKADYEKHKVYACEVTHQGLSSPVTKSFNRGEC

SEQ ID NO: 67 - protein, 239 aa, Artificial Sequence
  synthetic construct; antibody fragment
  SITE (229)..(239): This region may be absent in its entirety
  SITE (235)..(239): This region may be absent in its entirety
EVQLVQSGAEVKKPGASVKVSCKASGYTFTDYNMHWVRQAPGQGLEWMGEINPNSGGAGYNQKFKGRVTMTTDTSTSTAYMELRSLRSDDTAVYYCARLGYDDIYDDWYFDVWGQGTTVTVSSASTKGPSVFPLAPCSRSTSESTAALGCLVKDYFPEPVTVSWNSGALTSGVHTFPAVLQSSGLYSLSSVVTVPSSNFGTQTYTCNVDHKPSNTKVDKTVERKCCVECPPCPAPPVAG

SEQ ID NO: 68 - protein, 214 aa, Artificial Sequence
  synthetic construct; antibody fragment
DIQMTQSPSSLSASVGDRVTITCRASQDISNYLNWYQQKPGKAPKLLIYYTSRLLSGVPSRFSGSGSGTDFTLTISSLQPEDFATYYCQQGDTLPYTFGGGTKVEIKRTVAAPSVFIFPPSDEQLKSGTASVVCLLNNFYPREAKVQWKVDNALQSGNSQESVTEQDSKDSTYSLSSTLTLSKADYEKHKVYACEVTHQGLSSPVTKSFNRGEC

SEQ ID NO: 69 - protein, 247 aa, Artificial Sequence
  synthetic construct; antibody fragment
  SITE (227)..(247): This region may be absent in its entirety
  VARIANT (230)..(230): /replace="Leu"
  SITE (231)..(247): This region may be absent in its entirety
  SITE (237)..(247): This region may be absent in its entirety
EVQLLESGGGLVQPGGSLRLSCAASGFTFSHYIMMWVRQAPGKGLEWVSGIYSSGGITVYADSVKGRFTISRDNSKNTLYLQMNSLRAEDTAVYYCAYRRIGVPRRDEFDIWGQGTMVTVSSASTKGPSVFPLAPSSKSTSGGTAALGCLVKDYFPEPVTVSWNSGALTSGVHTFPAVLQSSGLYSLSSVVTVPSSSLGTQTYICNVNHKPSNTKVDKRVEPKSCDKTHTCPPCPAPELLGGPSVFL

SEQ ID NO: 70 - protein, 213 aa, Artificial Sequence
  synthetic construct; antibody fragment
DIQMTQSPSTLSASVGDRVTITCRASQSISSWLAWYQQKPGKAPKLLIYKASTLESGVPSRFSGSGSGTEFTLTISSLQPDDFATYYCQQYNTYWTFGQGTKVEIKRTVAAPSVFIFPPSDEQLKSGTASVVCLLNNFYPREAKVQWKVDNALQSGNSQESVTEQDSKDSTYSLSSTLTLSKADYEKHKVYACEVTHQGLSSPVTKSFNRGEC

SEQ ID NO: 71 - DNA, 711 bp, Artificial Sequence
  synthetic construct; antibody fragment
  misc_feature (649)..(711): This region may be absent in its entirety
  variation (658)..(660): /replace="ctg"
  misc_feature (661)..(711): This region may be absent in its entirety
  misc_feature (679)..(711): This region may be absent in its entirety
gaggtgcagctggtggagagcggcggcggcctggtgcagcccggcggcagcctgaggctgagctgcgccgccagcggcttcaccttcagcaggtacagcatgagctgggtgaggcaggcccccggcaagggcctggagctggtggcccagatcaacagcgtgggcaacagcacctactaccccgacaccgtgaagggcaggttcaccatcagcagggacaacgccaagaacaccctgtacctgcagatgaacagcctgagggccgaggacaccgccgtgtactactgcgccagcggcgactactggggccagggcaccctggtgaccgtgagcagcgccagcaccaagggccccagcgtgttccccctggcccccagcagcaagagcaccagcggcggcaccgccgccctgggctgcctggtgaaggactacttccccgagcccgtgaccgtgagctggaacagcggcgccctgaccagcggcgtgcacaccttccccgccgtgctgcagagcagcggcctgtacagcctgagcagcgtggtgaccgtgcccagcagcagcctgggcacccagacctacatctgcaacgtgaaccacaagcccagcaacaccaaggtggacaagaaggtggagcccaagagctgcgacaagacccacacctgccccccctgccccgcccccgagctgctgggcggccccagcgtgttcctg

SEQ ID NO: 72 - DNA, 657 bp, Artificial Sequence
  synthetic construct; antibody fragment
gacgtggtgatgacccagagccccctgagcctgcccgtgaccctgggccagcccgccagcatcagctgcaggagcagccagagcctgatctacagcgacggcaacgcctacctgcactggttcctgcagaagcccggccagagccccaggctgctgatctacaaggtgagcaacaggttcagcggcgtgcccgacaggttcagcggcagcggcagcggcaccgacttcaccctgaagatcagcagggtggaggccgaggacgtgggcgtgtactactgcagccagagcacccacgtgccctggaccttcggccagggcaccaaggtggagatcaagaggaccgtggccgcccccagcgtgttcatcttcccccccagcgacgagcagctgaagagcggcaccgccagcgtggtgtgcctgctgaacaacttctaccccagggaggccaaggtgcagtggaaggtggacaacgccctgcagagcggcaacagccaggagagcgtgaccgagcaggacagcaaggacagcacctacagcctgagcagcaccctgaccctgagcaaggccgactacgagaagcacaaggtgtacgcctgcgaggtgacccaccagggcctgagcagccccgtgaccaagagcttcaacaggggcgagtgc

SEQ ID NO: 73 - DNA, 720 bp, Artificial Sequence
  synthetic construct; antibody fragment
  variation (70)..(72): /replace="gtg"
  misc_feature (658)..(720): This region may be absent in its entirety
  variation (667)..(669): /replace="ctg"
  misc_feature (670)..(720): This region may be absent in its entirety
  misc_feature (688)..(720): This region may be absent in its entirety
gaggtgcagctggtggagagcggcggcggcctggtgcagcccggcggcagcctgaggctgagctgcgccgccagcggcttcaccttcagcgacaacggcatggcctgggtgaggcaggcccccggcaagggcctggagtgggtgagcttcatcagcaacctggcctacagcatcgactacgccgacaccgtgaccggcaggttcaccatcagcagggacaacgccaagaacagcctgtacctgcagatgaacagcctgagggccgaggacaccgccgtgtactactgcgtgagcggcacctggttcgcctactggggccagggcaccctggtgaccgtgagcagcgccagcaccaagggccccagcgtgttccccctggcccccagcagcaagagcaccagcggcggcaccgccgccctgggctgcctggtgaaggactacttccccgagcccgtgaccgtgagctggaacagcggcgccctgaccagcggcgtgcacaccttccccgccgtgctgcagagcagcggcctgtacagcctgagcagcgtggtgaccgtgcccagcagcagcctgggcacccagacctacatctgcaacgtgaaccacaagcccagcaacaccaaggtggacaagaaggtggagcccaagagctgcgacaagacccacacctgccccccctgccccgcccccgagctggccggcgcccccagcgtgttcctg

SEQ ID NO: 74 - DNA, 657 bp, Artificial Sequence
  synthetic construct; antibody fragment
gacatcgtgatgacccagagccccctgagcctgcccgtgacccccggcgagcccgccagcatcagctgcagggtgagccagagcctgctgcacagcaacggctacacctacctgcactggtacctgcagaagcccggccagagcccccagctgctgatctacaaggtgagcaacaggttcagcggcgtgcccgacaggttcagcggcagcggcagcggcaccgacttcaccctgaagatcagcagggtggaggccgaggacgtgggcgtgtactactgcagccagaccaggcacgtgccctacaccttcggcggcggcaccaaggtggagatcaagaggaccgtggccgcccccagcgtgttcatcttcccccccagcgacgagcagctgaagagcggcaccgccagcgtggtgtgcctgctgaacaacttctaccccagggaggccaaggtgcagtggaaggtggacaacgccctgcagagcggcaacagccaggagagcgtgaccgagcaggacagcaaggacagcacctacagcctgagcagcaccctgaccctgagcaaggccgactacgagaagcacaaggtgtacgcctgcgaggtgacccaccagggcctgagcagccccgtgaccaagagcttcaacaggggcgagtgc

SEQ ID NO: 75 - DNA, 762 bp, Artificial Sequence
  synthetic construct; antibody fragment
  misc_feature (700)..(762): This region may be absent in its entirety
  variation (709)..(711): /replace="ctg"
  misc_feature (712)..(762): This region may be absent in its entirety
  misc_feature (730)..(762): This region may be absent in its entirety
caggtgcagctggtgcagagcggcgccgaggtgaagaagcccggcgccagcgtgaaggtgagctgcaaggccagcggctacaccttcaccaagtactacatgagctgggtgaggcaggcccccggccagggcctggagtggatgggcatcatcaaccccatcggcggcagcaccagctacgcccagaagttccagggcagggtgaccatgaccagggacaccagcaccagcaccgtgtacatggagctgagcagcctgaggagcgaggacaccgccgtgtactactgcgccagggaccccagcggcatcgccctggccggccccgccagcaggggctaccagggcatggacgtgtggggccagggcaccaccgtgaccgtgagcagcgccagcaccaagggccccagcgtgttccccctggcccccagcagcaagagcaccagcggcggcaccgccgccctgggctgcctggtgaaggactacttccccgagcccgtgaccgtgagctggaacagcggcgccctgaccagcggcgtgcacaccttccccgccgtgctgcagagcagcggcctgtacagcctgagcagcgtggtgaccgtgcccagcagcagcctgggcacccagacctacatctgcaacgtgaaccacaagcccagcaacaccaaggtggacaagagggtggagcccaagagctgcgacaagacccacacctgccccccctgccccgcccccgagctgctgggcggccccagcgtgttcctg

SEQ ID NO: 76 - DNA, 642 bp, Artificial Sequence
  synthetic construct; antibody fragment
gagatcgtgatgacccagagccccgccaccctgagcgtgagccccggcgagagggccaccctgagctgcagggccagccagagcgtgagcagcaacctggcctggtaccagcagaagcccggccaggcccccaggctgctgatctacggcgccagcaccagggccaccggcatccccgccaggttcagcggcagcggcagcggcaccgagttcaccctgaccatcagcagcctgcagagcgaggacttcgccgtgtactactgccagcaggccaggctgggcccctggaccttcggcggcggcaccaaggtggagatcaagaggaccgtggccgcccccagcgtgttcatcttcccccccagcgacgagcagctgaagagcggcaccgccagcgtggtgtgcctgctgaacaacttctaccccagggaggccaaggtgcagtggaaggtggacaacgccctgcagagcggcaacagccaggagagcgtgaccgagcaggacagcaaggacagcacctacagcctgagcagcaccctgaccctgagcaaggccgactacgagaagcacaaggtgtacgcctgcgaggtgacccaccagggcctgagcagccccgtgaccaagagcttcaacaggggcgagtgc

SEQ ID NO: 77 - DNA, 711 bp, Artificial Sequence
  synthetic construct; antibody fragment
  misc_feature (652)..(711): This region may be absent in its entirety
  variation (667)..(668): /replace="ag"
  misc_feature (679)..(711): This region may be absent in its entirety
gaggtgaaggtggtggagagcggcggcggcctggtgcagcccggcggcagcatgaagctgagctgcgtggtgagcggcttcaccttcagcaactactgggtgaactgggtgaggcaggcccccggcaagggcctggagtgggtggcccagatcaggctgaagagcgacaactacgccacccactacgaggagagcgtgaagggcaggttcaccatcagcagggacgacagcaagagcagcgtgtacctgcagatgaacaacctgagggccgaggacagcggcatctactactgcaccaactgggaggactactggggccagggcaccaccgtgaccgtgagcagcgccagcaccaagggccccagcgtgttccccctggccccctgcagcaggagcaccagcgagagcaccgccgccctgggctgcctggtgaaggactacttccccgagcccgtgaccgtgagctggaacagcggcgccctgaccagcggcgtgcacaccttccccgccgtgctgcagagcagcggcctgtacagcctgagcagcgtggtgaccgtgcccagcagcagcctgggcaccaagacctacacctgcaacgtggaccacaagcccagcaacaccaaggtggacaagagggtggagagcaagtacggccccccctgccccccctgccccgcccccgagttcctgggcggccccagcgtgttcctg

SEQ ID NO: 78 - DNA, 654 bp, Artificial Sequence
  synthetic construct; antibody fragment
gacatcgtgctgacccagagccccgacagcctggccgtgagcctgggcgagagggccaccatcagctgcagggccagccagagcgtgagcaccagcaggtacagctacatccactggtaccagcagaagcccggccagttccccaagctgctgatcaagtacgccagcaacctggagagcggcgtgcccagcaggttcagcggcagcggcagcggcaccgacttcaccctgaacatccaccccctggagcccgaggacttcgccacctactactgccaccacagctgggagatccccctgaccttcggccagggcaccaagctggagatcaagaggaccgtggccgcccccagcgtgttcatcttcccccccagcgacgagcagctgaagagcggcaccgccagcgtggtgtgcctgctgaacaacttctaccccagggaggccaaggtgcagtggaaggtggacaacgccctgcagagcggcaacagccaggagagcgtgaccgagcaggacagcaaggacagcacctacagcctgagcagcaccctgaccctgagcaaggccgactacgagaagcacaaggtgtacgcctgcgaggtgacccaccagggcctgagcagccccgtgaccaagagcttcaacaggggcgagtgc

SEQ ID NO: 79 - DNA, 720 bp, Artificial Sequence
  synthetic construct; antibody fragment
  variation (181)..(183): /replace="acc"
  misc_feature (661)..(720): This region may be absent in its entirety
  variation (676)..(677): /replace="ag"
  misc_feature (688)..(720): This region may be absent in its entirety
gaggtgcagctgcaggagagcggccccggcctggtgaagcccagcgagaccctgagcctgacctgcaccgtgagcggcttcagcctgaccagcaacgacatcgcctggatcaggcagccccccggcaagggcctggagtggatgggcaccatctggaccgacggcagcaccaactacaacgccgccgtgcagagcagggtgaccatcagcgtggacaccagcaagaaccagttcagcctgaagctgagcagcgtgaccgccgccgacaccgccgtgtactactgcgccaggcacaggctgtactacggcgccttcgactactggggccagggcaccatggtgaccgtgagcagcgccagcaccaagggccccagcgtgttccccctggccccctgcagcaggagcaccagcgagagcaccgccgccctgggctgcctggtgaaggactacttccccgagcccgtgaccgtgagctggaacagcggcgccctgaccagcggcgtgcacaccttccccgccgtgctgcagagcagcggcctgtacagcctgagcagcgtggtgaccgtgcccagcagcagcctgggcaccaagacctacacctgcaacgtggaccacaagcccagcaacaccaaggtggacaagagggtggagagcaagtacggccccccctgccccccctgccccgcccccgagttcctgggcggccccagcgtgttcctg

SEQ ID NO: 80 - DNA, 657 bp, Artificial Sequence
  synthetic construct; antibody fragment
gacatcgtgatgacccagacccccctgagcctgagcgtgacccccggccagcccgccagcatcagctgcaggagcagccagagcctggagtacagcgacggctacacctacctggagtggtacctgcagaagcccggccagagcccccagctgctgatctacgaggtgagcaacaggttcagcggcgtgcccgacaggttcagcggcagcggcagcggcaccgacttcaccctgaagatcagcagggtggaggccgaggacgtgggcgtgtactactgcttccaggccacccacaacccctacaccttcggccagggcaccaagctggagatcaagaggaccgtggccgcccccagcgtgttcatcttcccccccagcgacgagcagctgaagagcggcaccgccagcgtggtgtgcctgctgaacaacttctaccccagggaggccaaggtgcagtggaaggtggacaacgccctgcagagcggcaacagccaggagagcgtgaccgagcaggacagcaaggacagcacctacagcctgagcagcaccctgaccctgagcaaggccgactacgagaagcacaaggtgtacgcctgcgaggtgacccaccagggcctgagcagccccgtgaccaagagcttcaacaggggcgagtgc

SEQ ID NO: 81 - DNA, 747 bp, Artificial Sequence
  synthetic construct; antibody fragment
  misc_feature (685)..(747): This region may be absent in its entirety
  variation (694)..(696): /replace="ctg"
  misc_feature (697)..(747): This region may be absent in its entirety
  misc_feature (715)..(747): This region may be absent in its entirety
caggtgcagctggtggagagcggcggcggcgtggtgcagcccggcaggagcctgagggtgagctgcgccgccagcggcttcaccttcagcagctacgacatgcactgggtgaggcaggcccccggcaagggcctggagtgggtggccgtgatctggttcgacggcagcaacgagttctacgccgacagcgtgaagggcaggttcaccatcagcagggacaacagcaagaacaccctgttccagatgaacagcctgagggccgaggacaccgccgtgtactactgcgccagggacctgggcgccagcgtgaccaccagcaacgccgagaacttccaccactggggccagggcaccctggtgaccgtgagcagcgccagcaccaagggccccagcgtgttccccctggcccccagcagcaagagcaccagcggcggcaccgccgccctgggctgcctggtgaaggactacttccccgagcccgtgaccgtgagctggaacagcggcgccctgaccagcggcgtgcacaccttccccgccgtgctgcagagcagcggcctgtacagcctgagcagcgtggtgaccgtgcccagcagcagcctgggcacccagacctacatctgcaacgtgaaccacaagcccagcaacaccaaggtggacaagaaggtggagcccaagagctgcgacaagacccacacctgccccccctgccccgcccccgagctggccggcgcccccagcgtgttcctg

SEQ ID NO: 82 - DNA, 639 bp, Artificial Sequence
  synthetic construct; antibody fragment
agctacgagctgacccagccccccagcgtgagcgtgagccccggccagaccgccaggatcacctgcagcggcgacgccctgcccaagaggtacgtgtactggtaccagcagaagagcggccaggcccccgtgctggtgatctacgaggacagcaagaggcccagcggcatccccgagaccttcagcggcagcagcagcggcaccatggccaccctgaccatcagcggcgcccaggtggaggacgaggccgactactactgctacagcaccgacagcaacggccaccactgggtgttcggcggcggcaccaagctgaccgtgctgggccagcccaaggccgcccccagcgtgaccctgttcccccccagcagcgaggagctgcaggccaacaaggccaccctggtgtgcctgatcagcgacttctaccccggcgccgtgaccgtggcctggaaggccgacagcagccccgtgaaggccggcgtggagaccaccacccccagcaagcagagcaacaacaagtacgccgccagcagctacctgagcctgacccccgagcagtggaagagccacaggagctacagctgccaggtgacccacgagggcagcaccgtggagaagaccgtggcccccacctgcagc

SEQ ID NO: 83 - DNA, 735 bp, Artificial Sequence
  synthetic construct; antibody fragment
  misc_feature (676)..(735): This region may be absent in its entirety
  variation (691)..(692): /replace="ag"
  misc_feature (703)..(735): This region may be absent in its entirety
caggtgcagctggtgcagagcggcgccgaggtgaagaagcccggcagcagcgtgaaggtgagctgcaaggccagcggctacagcttcagcgactactacatgcactgggtgaggcaggcccccggccagggcctggagtggatgggccagatcaaccccaccaccggcggcgccagctacaaccagaagttcaagggcaaggccaccatcaccgtggacaagagcaccagcaccgcctacatggagctgagcagcctgaggagcgaggacaccgccgtgtactactgcgccaggtactactacggcaggcacttcgacgtgtggggccagggcaccaccgtgaccgtgagcagcgccagcaccaagggccccagcgtgttccccctggccccctgcagcaggagcaccagcgagagcaccgccgccctgggctgcctggtgaaggactacttccccgagcccgtgaccgtgagctggaacagcggcgccctgaccagcggcgtgcacaccttccccgccgtgaccgtgagcagcgtgctgcagagcagcggcctgtacagcctgagcagcgtggtgaccgtgcccagcagcagcctgggcaccaagacctacacctgcaacgtggaccacaagcccagcaacaccaaggtggacaagagggtggagagcaagtacggccccccctgccccccctgccccgcccccgagttcctgggcggccccagcgtgttcctg

SEQ ID NO: 84 - DNA, 630 bp, Artificial Sequence
  synthetic construct; antibody fragment
gacatcgtgatgacccagagccccgacagcctggccgtgagcctgggcgagagggccaccatcaactgcaaggccagccagagcgtggactacgacggcgacagctacatgaactggtaccagcagaagcccggccagccccccaagctgctgatctacgccgccagcaacctggagagcggcgtgcccgacaggttcagcggcagcggcagcggcaccgacttcaccctgaccatcagcagcctgcaggccgaggacgtggccgtgtactactgccagcagagcaacgaggacccctacaccttcggccagggcaccaagctggagatcaagttcatcttcccccccagcgacgagcagctgaagagcggcaccgccagcgtggtgtgcctgctgaacaacttctaccccagggaggccaaggtgcagtggaaggtggacaacgccctgcagagcggcaacagccaggagagcgtgaccgagcaggacagcaaggacagcacctacagcctgagcagcaccctgaccctgagcaaggccgactacgagaagcacaaggtgtacgcctgcgaggtgacccaccagggcctgagcagccccgtgaccaagagcttcaacaggggcgagtgc

SEQ ID NO: 85 - DNA, 723 bp, Artificial Sequence
  synthetic construct; antibody fragment
  misc_feature (661)..(723): This region may be absent in its entirety
  variation (670)..(672): /replace="ctg"
  misc_feature (673)..(723): This region may be absent in its entirety
  misc_feature (691)..(723): This region may be absent in its entirety
gaggtgcagctggtggagagcggcggcggcctggtgcagcccggcggcagcctgaggctgagctgcgccgccagcggcttcaccttcagcaactacggcatgagctgggtgaggcaggcccccggcaagggcctggagtgggtggccagcatcagcagcggcggcggcagcacctactaccccgacaacgtgaagggcaggttcaccatcagcagggacgacgccaagaacagcctgtacctgcagatgaacagcctgagggccgaggacaccgccgtgtactactgcgccaggggcggcgccggcatcgactactggggccagggcaccctggtgaccgtgagcagcgccagcaccaagggccccagcgtgttccccctggcccccagcagcaagagcaccagcggcggcaccgccgccctgggctgcctggtgaaggactacttccccgagcccgtgaccgtgagctggaacagcggcgccctgaccagcggcgtgcacaccttccccgccgtgctgcagagcagcggcctgtacagcctgagcagcgtggtgaccgtgcccagcagcagcctgggcacccagacctacatctgcaacgtgaaccacaagcccagcaacaccaaggtggacaagagggtggagcccaagagctgcgacaagacccacacctgccccccctgccccgcccccgagctgctgggcggccccagcgtgttcctg

SEQ ID NO: 86 - DNA, 660 bp, Artificial Sequence
  synthetic construct; antibody fragment
gacatccagatgacccagagccccagcagcctgagcgccagcgtgggcgacagggtgaccatcacctgcaagagcatccagaccctgctgtacagcagcaaccagaagaactacctggcctggttccagcagaagcccggcaaggcccccaagctgctgatctactgggccagcatcaggaagagcggcgtgcccagcaggttcagcggcagcggcagcggcaccgacttcaccctgaccatcagcagcctgcagcccgaggacctggccacctactactgccagcagtactacagctaccccctgaccttcggcggcggcaccaagctggagatcaagaggaccgtggccgcccccagcgtgttcatcttcccccccagcgacgagcagctgaagagcggcaccgccagcgtggtgtgcctgctgaacaacttctaccccagggaggccaaggtgcagtggaaggtggacaacgccctgcagagcggcaacagccaggagagcgtgaccgagcaggacagcaaggacagcacctacagcctgagcagcaccctgaccctgagcaaggccgactacgagaagcacaaggtgtacgcctgcgaggtgacccaccagggcctgagcagccccgtgaccaagagcttcaacaggggcgagtgc

SEQ ID NO: 87 - DNA, 747 bp, Artificial Sequence
  synthetic construct; antibody fragment
  misc_feature (685)..(747): This region may be absent in its entirety
  variation (694)..(696): /replace="ctg"
  misc_feature (697)..(747): This region may be absent in its entirety
  misc_feature (715)..(747): This region may be absent in its entirety
gaggtgcagctggtggagagcggcgccgaggtgaagaagcccggcgccagcgtgaaggtgagctgcaaggccagcggctacaccttcaccaactacgccatgcactgggtgaggcaggcccccggccagaggctggagtggatgggctggatcaacgccggcaacggcaagaggaagtacagccagaagttccaggacagggtgaccatcaacagggacaccagcgccagcaccatctacatggagctgagcagcctgggcagcgaggacaccgccgtgtactactgcgccagggaggaggaccacgccggcagcggcagctacctgagcatggacgtgtggggccagggcaccctggtgaccgtgagcagcgccagcaccaagggccccagcgtgttccccctggcccccagcagcaagagcaccagcggcggcaccgccgccctgggctgcctggtgaaggactacttccccgagcccgtgaccgtgagctggaacagcggcgccctgaccagcggcgtgcacaccttccccgccgtgctgcagagcagcggcctgtacagcctgagcagcgtggtgaccgtgcccagcagcagcctgggcacccagacctacatctgcaacgtgaaccacaagcccagcaacaccaaggtggacaagagggtggagcccaagagctgcgacaagacccacacctgccccccctgccccgcccccgagctgctgggcggccccagcgtgttcctg

SEQ ID NO: 88 - DNA, 660 bp, Artificial Sequence; identical to SEQ ID NO: 86
  synthetic construct; antibody fragment

SEQ ID NO: 89 - DNA, 741 bp, Artificial Sequence
  synthetic construct; antibody fragment
  misc_feature (679)..(741): This region may be absent in its entirety
  variation (688)..(690): /replace="ctg"
  misc_feature (691)..(741): This region may be absent in its entirety
  misc_feature (709)..(741): This region may be absent in its entirety
gaggtgcagctgctggagagcggcggcggcctggtgcagcccggcggcagcctgaggctgagctgcgccgccagcggcttcaccttcagcagctacgccatgagctgggtgaggcaggcccccggcaagggcctggagtgggtgagcagcatcagccacctgggcggcagcacctactacgccgacagcgtgaagggcaggttcaccatcagcagggacaacagcaagaacaccctgtacctgcagatgaacagcctgagggccgaggacaccgccgtgtactactgcgccggcggcgccaaccacggcaagtactactacggcatggacaagtggggccagggcaccaccgtgaccgtgagcagcgccagcaccaagggccccagcgtgttccccctggcccccagcagcaagagcaccagcggcggcaccgccgccctgggctgcctggtgaaggactacttccccgagcccgtgaccgtgagctggaacagcggcgccctgaccagcggcgtgcacaccttccccgccgtgctgcagagcagcggcctgtacagcctgagcagcgtggtgaccgtgcccagcagcagcctgggcacccagacctacatctgcaacgtgaaccacaagcccagcaacaccaaggtggacaagagggtggagcccaagagctgcgacaagacccacacctgccccccctgccccgcccccgagttcgagggcggccccagcgtgttcctg

SEQ ID NO: 90 - DNA, 663 bp, Artificial Sequence
  synthetic construct; antibody fragment
caggccgtgctgacccagcccgccagcctgagcgccagccccggcgccagcgccagcctgacctgcaccctgaggagcggcgcccccctgcccaagtacaggatctactggtaccagcagaagcccggcagccccccccagtacctgctgaggtacaagagcgacgccgacaagcaccagggcagcggcgtgcccagcaggttcagcggcagcaaggacgccagcgccaacgccggcatcctgctgatcagcggcctgcagagcgaggacgaggccgactactactgcatggtgtgggaccacggcgtgtggtacttcggcggcggcaccaagctgaccgtgctgggccagcccaaggccgcccccagcgtgaccctgttcccccccagcagcgaggagctgcaggccaacaaggccaccctggtgtgcctgatcagcgacttctaccccggcgccgtgaccgtggcctggaaggccgacagcagccccgtgaaggccggcgtggagaccaccacccccagcaagcagagcaacaacaagtacgccgccagcagctacctgagcctgacccccgagcagtggaagagccacaggagctacagctgccaggtgacccacgagggcagcaccgtggagaagaccgtggcccccaccgagtgcagc

SEQ ID NO: 91 - DNA, 753 bp, Artificial Sequence
  synthetic construct; antibody fragment
  misc_feature (691)..(753): This region may be absent in its entirety
  variation (700)..(702): /replace="ctg"
  misc_feature (703)..(753): This region may be absent in its entirety
  misc_feature (721)..(753): This region may be absent in its entirety
gaggtgcagctggtggagagcggcggcgacctggtgaggcccggcggcagcctgaggctgagctgcgtggccagcggcttcaccttcagcaactactggatgcactgggtgaggcaggcccccggccagaggcccgtgtgggtgagcaggaccaacaccgacggcaggaacaccgcctacgccgactacgccaagggcaggttcaccatcagcagggacaacgccaagagcaccctgtacctgcagctgaacagcctgagggccgaggacaccgccgtgtacttctgcgccaggctgaggaggaacgtggccgaccagatcacccacaactactacatggacgtgtggggcaagggcaccctggtgaccgtgagcagcgccagcaccaagggccccagcgtgttccccctggcccccagcagcaagagcaccagcggcggcaccgccgccctgggctgcctggtgaaggactacttccccgagcccgtgaccgtgagctggaacagcggcgccctgaccagcggcgtgcacaccttccccgccgtgctgcagagcagcggcctgtacagcctgagcagcgtggtgaccgtgcccagcagcagcctgggcacccagacctacatctgcaacgtgaaccacaagcccagcaacaccaaggtggacaagaaggtggagcccaagagctgcgacaagacccacacctgccccccctgccccgcccccgaggccgccggcggccccagcgtgttcctg

SEQ ID NO: 92 - DNA, 639 bp, Artificial Sequence
  synthetic construct; antibody fragment
gacatccagatgacccagagccccagcagcctgagcgccagcgtgggcgacagggtgaccgcctgcagggccagccagagcgtgggcacctacctgaactggtaccagcagaagaggggcaaggcccccaagctgctgatcttcgccgccagcagcctgcagagcggcgtgcccagcaggttcagcggcagcggcagcggcaccgacttcaccctgaccatcagcagcctgcagcccgaggacttcgccacctactactgccagcagagctacagcagcccccccaccttcggccagggcaccaaggtggagatcaagaggaccgtggccgcccccagcgtgttcatcttcccccccagcgacgagcagctgaagagcggcaccgccagcgtggtgtgcctgctgaacaacttctaccccagggaggccaaggtgcagtggaaggtggacaacgccctgcagagcggcaacagccaggagagcgtgaccgagcaggacagcaaggacagcacctacagcctgagcagcaccctgaccctgagcaaggccgactacgagaagcacaaggtgtacgcctgcgaggtgacccaccagggcctgagcagccccgtgaccaagagcttcaacaggggcgagtgc

SEQ ID NO: 93 - DNA, 744 bp, Artificial Sequence
  synthetic construct; antibody fragment
  misc_feature (682)..(744): /note="This region may be absent in its entirety"
  variation (691)..(693): /replace="ctg"
  misc_feature (694)..(744): /note="This region may be absent in its entirety"
  misc_feature (712)..(744): This region may be absent in its entirety
caggtgcagctggtgcagagcggcgccgaggtgaagaagcccggcgccagcgtgaccctgagctgcaaggccagcggctacaccttcaccgcctactacatccactgggtgaggcaggccagggagcagggcctggagtggatgggcgtgatcaaccccagcaccggcaccaccttctacgcccagaacttccccgacagggtgagcgtgaccagggacaccagcaccagcaccgtgttcatggagctgcacaacctgaagagcgaggacaccgccgtgtactactgcgccagggccatcagcgagcacggcagcggcagctacagcccctactactggggccagggcaccctggtgaccgtgagcagcgccagcaccaagggccccagcgtgttccccctggcccccagcagcaagagcaccagcggcggcaccgccgccctgggctgcctggtgaaggactacttccccgagcccgtgaccgtgagctggaacagcggcgccctgaccagcggcgtgcacaccttccccgccgtgctgcagagcagcggcctgtacagcctgagcagcgtggtgaccgtgcccagcagcagcctgggcacccagacctacatctgcaacgtgaaccacaagcccagcaacaccaaggtggacaagaaggtggagcccaagagctgcgacaagacccacacctgccccccctgccccgcccccgaggccgccggcggccccagcgtgttcctg

SEQ ID NO: 94 - DNA, 321 bp, Artificial Sequence
  synthetic construct; antibody fragment
agctacgagctgacccagccccccagcgtgagcgtgagcctgggccagatggccgccatcacctgcagcggcgaggccctgcccaagaagtacggctactggtaccagcagaagcccggccaggtgcccgtgctgctgatctacagggacgtggagaggcccagcggcgtgcccgacaggttcagcggcagcagcagcggcaccatggtgaccctgaccatcagcggcgtgcaggccgaggacgaggccgactactactgcctgagcgccgacagcagcggcacctgggtgttcggcggcggcaccaagctgaccgtgctg

SEQ ID NO: 95 - DNA, 708 bp, Artificial Sequence
  synthetic construct; antibody fragment
  misc_feature (646)..(708): /note="This region may be absent in its entirety"
  variation (655)..(657): /replace="ctg"
  misc_feature (658)..(708): /note="This region may be absent in its entirety"
  misc_feature (676)..(708): This region may be absent in its entirety
gaggtgcagctggtggagagcggcggcggcctggtgcagcccggcggcagcctgaggctgagctgcgccgtgagcggcatcgacctgagcggctactacatgaactgggtgaggcaggcccccggcaagggcctggagtgggtgggcgtgatcggcatcaacggcgccacctactacgccagctgggccaagggcaggttcaccatcagcagggacaacagcaagaccaccgtgtacctgcagatgaacagcctgagggccgaggacaccgccgtgtacttctgcgccaggggcgacatctggggccagggcaccctggtgaccgtgagcagcgccagcaccaagggccccagcgtgttccccctggcccccagcagcaagagcaccagcggcggcaccgccgccctgggctgcctggtgaaggactacttccccgagcccgtgaccgtgagctggaacagcggcgccctgaccagcggcgtgcacaccttccccgccgtgctgcagagcagcggcctgtacagcctgagcagcgtggtgaccgtgcccagcagcagcctgggcacccagacctacatctgcaacgtgaaccacaagcccagcaacaccaaggtggacgccagggtggagcccaagagctgcgacaagacccacacctgccccccctgccccgcccccgagctgctgggcggccccagcgtgaccctg

SEQ ID NO: 96 - DNA, 657 bp, Artificial Sequence
  synthetic construct; antibody fragment
caggtgctgacccagagccccagcagcctgagcgccagcgtgggcgacagggtgaccatcaactgccaggccagccagagcgtgtaccacaacacctacctggcctggtaccagcagaagcccggcaaggtgcccaagcagctgatctacgacgccagcaccctggccagcggcgtgcccagcaggttcagcggcagcggcagcggcaccgacttcaccctgaccatcagcagcctgcagcccgaggacgtggccacctactactgcctgggcagctacgactgcaccaacggcgactgcttcgtgttcggcggcggcaccaaggtggagatcaagaggaccgtggccgcccccagcgtgttcatcttcccccccagcgacgagcagctgaagagcggcaccgccagcgtggtgtgcctgctgaacaacttctaccccagggaggccaaggtgcagtggaaggtggacaacgccctgcagagcggcaacagccaggagagcgtgaccgagcaggacagcaaggacagcacctacagcctgagcagcaccctgaccctgagcaaggccgactacgagaagcacaaggtgtacgcctgcgaggtgacccaccagggcctgagcagccccgtgaccaagagcttcaacaggggcgagtgc

SEQ ID NO: 97 - DNA, 714 bp, Artificial Sequence
  synthetic construct; antibody fragment
  misc_feature (682)..(714): This region may be absent in its entirety
  misc_feature (700)..(714): This region may be absent in its entirety
gaggtgcagctggtggagagcggcggcggcctggtgcagcccggcggcagcctgaggctgagctgcgccgccagcggcttcaccttcagcaactactggatcagctgggtgaggcaggcccccggcaagggcctggagtgggtggccgagatcaggagcgagagcgacgccagcgccacccactacgccgaggccgtgaagggcaggttcaccatcagcagggacaacgccaagaacagcctgtacctgcagatgaacagcctgagggccgaggacaccgccgtgtactactgcctggcctacttcgactacggcctggccatccagaactactggggccagggcaccctggtgaccgtgagcagcgccagcaccaagggccccagcgtgttccccctggccccctgcagcaggagcaccagcgagagcaccgccgccctgggctgcctggtgaaggactacttccccgagcccgtgaccgtgagctggaacagcggcgccctgaccagcggcgtgcacaccttccccgccgtgctgcagagcagcggcctgtacagcctgagcagcgtggtgaccgtgcccagcagcaacttcggcacccagacctacacctgcaacgtggaccacaagcccagcaacaccaaggtggacaagaccgtggagaggaagtgctgcgtggagtgccccccctgccccgccccccccgtggccggc

SEQ ID NO: 98 - DNA, 642 bp, Artificial Sequence
  synthetic construct; antibody fragment
gagatcgtgctgacccagagccccgccaccctgagcctgagccccggcgagagggccaccctgagctgcaaggccagcaagagggtgaccacctacgtgagctggtaccagcagaagcccggccaggcccccaggctgctgatctacggcgccagcaacaggtacctgggcatccccgccaggttcagcggcagcggcagcggcaccgacttcaccctgaccatcagcagcctggagcccgaggacttcgccgtgtactactgcagccagagctacaactacccctacaccttcggccagggcaccaagctggagatcaagaggaccgtggccgcccccagcgtgttcatcttcccccccagcgacgagcagctgaagagcggcaccgccagcgtggtgtgcctgctgaacaacttctaccccagggaggccaaggtgcagtggaaggtggacaacgccctgcagagcggcaacagccaggagagcgtgaccgagcaggacagcaaggacagcacctacagcctgagcagcaccctgaccctgagcaaggccgactacgagaagcacaaggtgtacgcctgcgaggtgacccaccagggcctgagcagccccgtgaccaagagcttcaacaggggcgagtgc

SEQ ID NO: 99 - DNA, 723 bp, Artificial Sequence
  synthetic construct; antibody fragment
  misc_feature (664)..(723): This region may be absent in its entirety
  variation (679)..(680): /replace="ag"
  misc_feature (691)..(723): This region may be absent in its entirety
caggtgcagctggtgcagagcggcgccgaggtgaagaagcccggcagcagcgtgaaggtgagctgcaaggccagcggctacaccttcggcaactactggatgcagtgggtgaggcaggcccccggccagggcctggagtggatgggcgccatctacgagggcaccggcaagaccgtgtacatccagaagttcgccgacagggtgaccatcaccgccgacaagagcaccagcaccgcctacatggagctgagcagcctgaggagcgaggacaccgccgtgtactactgcgccaggctgagcgactacgtgagcggcttcggctactggggccagggcaccaccgtgaccgtgagcagcgccagcaccaagggccccagcgtgttccccctggccccctgcagcaggagcaccagcgagagcaccgccgccctgggctgcctggtgaaggactacttccccgagcccgtgaccgtgagctggaacagcggcgccctgaccagcggcgtgcacaccttccccgccgtgctgcagagcagcggcctgtacagcctgagcagcgtggtgaccgtgcccagcagcagcctgggcaccaagacctacacctgcaacgtggaccacaagcccagcaacaccaaggtggacaagagggtggagagcaagtacggccccccctgccccccctgccccgcccccgaggccgccggcggccccagcgtgttcctg

SEQ ID NO: 100 - DNA, 642 bp, Artificial Sequence
  synthetic construct; antibody fragment
gacatccagatgacccagagccccagcagcctgagcgccagcgtgggcgacagggtgaccatcacctgcagggccagcaaggacatcagcaagtacctgaactggtaccagcagaagcccggcaaggcccccaagctgctgatctactacaccagcggctaccacagcggcgtgcccagcaggttcagcggcagcggcagcggcaccgacttcaccctgaccatcagcagcctgcagcccgaggacttcgccacctactactgccagcagggcgacgccctgccccccaccttcggcggcggcaccaaggtggagatcaagaggaccgtggccgcccccagcgtgttcatcttcccccccagcgacgagcagctgaagagcggcaccgccagcgtggtgtgcctgctgaacaacttctaccccagggaggccaaggtgcagtggaaggtggacaacgccctgcagagcggcaacagccaggagagcgtgaccgagcaggacagcaaggacagcacctacagcctgagcagcaccctgaccctgagcaaggccgactacgagaagcacaaggtgtacgcctgcgaggtgacccaccagggcctgagcagccccgtgaccaagagcttcaacaggggcgagtgc

SEQ ID NO: 101 - DNA, 741 bp, Artificial Sequence
  synthetic construct; antibody fragment
  misc_feature (679)..(741): /note="This region may be absent in its entirety"
  variation (688)..(690): /replace="ctg"
  misc_feature (691)..(741): This region may be absent in its entirety
  misc_feature (709)..(741): This region may be absent in its entirety
gaggtgcagctggtggagagcggcggcggcctggtgaagcccggcggcagcctgaggctgagctgcgccgccagcggcttcagcttcagcaacaacgacgtgatgtgctgggtgaggcaggcccccggcaagggcctggagtggatcggctgcatcatgaccaccgacgtggtgaccgagtacgccaactgggccaagagcaggttcaccgtgagcagggacagcgccaagaacagcgtgtacctgcagatgaacagcctgagggccgaggacaccgccgtgtacttctgcgccagggacagcgtgggcagccccctgatgagcttcgacctgtggggccccggcaccctggtgaccgtgagcagcgccagcaccaagggccccagcgtgttccccctggcccccagcagcaagagcaccagcggcggcaccgccgccctgggctgcctggtgaaggactacttccccgagcccgtgaccgtgagctggaacagcggcgccctgaccagcggcgtgcacaccttccccgccgtgctgcagagcagcggcctgtacagcctgagcagcgtggtgaccgtgcccagcagcagcctgggcacccagacctacatctgcaacgtgaaccacaagcccagcaacaccaaggtggacaagaaggtggagcccaagagctgcgacaagacccacacctgccccccctgccccgcccccgagctgctgggcggccccagcgtgttcctg

SEQ ID NO: 102 - DNA, 657 bp, Artificial Sequence
  synthetic construct; antibody fragment
gacatccagatgacccagagccccagcagcctgagcgccagcgtgggcgacagggtgaccatcaactgccaggccagccagagcatctacaacaacaacgagctgagctggtaccagcagaagcccggcaagccccccaagctgctgatctacagggccagcaccctggccagcggcgtgcccagcaggttcagcggcagcggcagcggcaccgacttcaccctgaccatcagcagcctgcagcccgaggacgtggccacctactactgcggcggctacaagagctacagcaacgacggcaacggcttcggcggcggcaccaaggtggagatcaagaggaccgtggccgcccccagcgtgttcatcttcccccccagcgacgagcagctgaagagcggcaccgccagcgtggtgtgcctgctgaacaacttctaccccagggaggccaaggtgcagtggaaggtggacaacgccctgcagagcggcaacagccaggagagcgtgaccgagcaggacagcaaggacagcacctacagcctgagcagcaccctgaccctgagcaaggccgactacgagaagcacaaggtgtacgcctgcgaggtgacccaccagggcctgagcagccccgtgaccaagagcttcaacaggggcgagtgc

SEQ ID NO: 103 - DNA, 726 bp, Artificial Sequence
  synthetic construct; antibody fragment
  misc_feature (664)..(726): /note="This region may be absent in its entirety"
  variation (673)..(675): /replace="ctg"
  misc_feature (676)..(726): This region may be absent in its entirety
  misc_feature (694)..(726): /note="This region may be absent in its entirety"
  misc_feature (694)..(726): This region may be absent in its entirety
gaggtgcagctggtgcagagcggcgccgaggtgaagaagcccggcgagagcctgaagatcagctgcaagggcagcggctacagcttcaccagctactggatcggctgggtgaggcagatgcccggcaagggcctggagtggatgggctggatcgacccctacaggagcgagatcaggtacagccccagcttccagggccaggtgaccatcagcgccgacaagagcatcagcaccgcctacctgcagtggagcagcctgaaggccagcgacaccgccatgtactactgcgccagggtgagcagcgagcccttcgacagctggggccagggcaccctggtgaccgtgagcagcgccagcaccaagggccccagcgtgttccccctggcccccagcagcaagagcaccagcggcggcaccgccgccctgggctgcctggtgaaggactacttccccgagcccgtgaccgtgagctggaacagcggcgccctgaccagcggcgtgcacaccttccccgccgtgctgcagagcagcggcctgtacagcctgagcagcgtggtgaccgtgcccagcagcagcctgggcacccagacctacatctgcaacgtgaaccacaagcccagcaacaccaaggtggacaagagggtggagcccaagagctgcgacaagacccacacctgccccccctgccccgcccccgagctgctgggcggccccagcgtgttcctg

SEQ ID NO: 104 - DNA, 639 bp, Artificial Sequence
  synthetic construct; antibody fragment
agctacgtgctgacccagccccccagcgtgagcgtggcccccggcaagaccgccaggatcacctgcagcggcgacaagctgggcgaccactacgcctactggtaccagcagaagcccggccaggcccccgtgctggtgatctacgacgacagcaagaggcccagcggcatccccgagaggttcagcggcagcaacagcggcaacaccgccaccctgaccatcagcagggtggaggccggcgacgaggccgactactactgcgccacctggaccttcgagggcgactacgtgttcggcggcggcaccaagctgaccgtgctgggccagcccaaggccgcccccagcgtgaccctgttcccccccagcagcgaggagctgcaggccaacaaggccaccctggtgtgcctgatcagcgacttctaccccggcgccgtgaccgtggcctggaaggccgacagcagccccgtgaaggccggcgtggagaccaccacccccagcaagcagagcaacaacaagtacgccgccagcagctacctgagcctgacccccgagcagtggaagagccacaggagctacagctgccaggtgacccacgagggcagcaccgtggagaagaccgtggcccccaccgagtgcagc

SEQ ID NO: 105 - DNA, 756 bp, Artificial Sequence
  synthetic construct; antibody fragment
  misc_feature (694)..(756): This region may be absent in its entirety
  variation (703)..(705): /replace="ctg"
  misc_feature (706)..(756): This region may be absent in its entirety
  misc_feature (724)..(756): This region may be absent in its entirety
caggtgcagctgcagcagagcggccccggcctggtgaagcccagccagaccctgagcctgacctgcgccatcagcggcgacagcgtgagcagcaacaccgccgcctggaactggatcaggcagagccccagcaggggcctggagtggctgggcgtgatctactacaggagcaagtggtacaacgactacgccgtgagcgtgaagagcaggatcaccatcaaccccgacaccagcaagaaccagttcagcctgcagctgaacagcgtgacccccgaggacaccgccgtgtactactgcgccaggagcgtgcccggcggcgaccccggcctggagcacgccttcgcctactggggcaggggcaccctggtgaccgtgagcagcgccagcaccaagggccccagcgtgttccccctggcccccagcagcaagagcaccagcggcggcaccgccgccctgggctgcctggtgaaggactacttccccgagcccgtgaccgtgagctggaacagcggcgccctgaccagcggcgtgcacaccttccccgccgtgctgcagagcagcggcctgtacagcctgagcagcgtggtgaccgtgcccagcagcagcctgggcacccagacctacatctgcaacgtgaaccacaagcccagcaacaccaaggtggacaagagggtggagcccaagagctgcgacaagacccacacctgccccccctgccccgcccccgagctgctgggcggccccagcgtgttcctg

SEQ ID NO: 106 - DNA, 639 bp, Artificial Sequence
  synthetic construct; antibody fragment
agctacgtgctgacccagccccccagcgtgagcgtggcccccggcaagaccgccaggatcacctgcagcggcgacaacctgggcacctactacgtggagtggtaccagcagaagcccggccaggcccccgtgctggtgatctacgacgacagcgacaggcccagcggcatccccgagaggttcagcggcagcaacagcggcaacaccgccaccctgaccatcagcagggtggaggccggcgacgaggccgactactactgcgccagcttcgccagctggagcgacagcgtgttcggcggcggcaccaagctgaccgtgctgggccagcccaaggccgcccccagcgtgaccctgttcccccccagcagcgaggagctgcaggccaacaaggccaccctggtgtgcctgatcagcgacttctaccccggcgccgtgaccgtggcctggaaggccgacagcagccccgtgaaggccggcgtggagaccaccacccccagcaagcagagcaacaacaagtacgccgccagcagctacctgagcctgacccccgagcagtggaagagccacaggagctacagctgccaggtgacccacgagggcagcaccgtggagaagaccgtggcccccaccgagtgcagc

SEQ ID NO: 107 - DNA, 642 bp, Artificial Sequence
  synthetic construct; antibody fragment
  misc_feature (610)..(642): This region may be absent in its entirety
  misc_feature (628)..(642): This region may be absent in its entirety
acctgcaccgtgagcggcggcagcatcagcagcggcgagtactactggaactggatcaggcagcaccccggcaagggcctggagtggatcggctacatctactacagcggcagcacctactacaaccccagcctgaagagcagggtgaccatcagcgtggacaccagcaagaaccagttcagcctgaagctgagcagcgtgaccgccgccgacaccgccgtgtactactgcgccagggagagcgtggccggcttcgactactggggccagggcaccctggtgaccgtgagcagcgccagcaccaagggccccagcgtgttccccctggccccctgcagcaggagcaccagcgagagcaccgccgccctgggctgcctggtgaaggactacttccccgagcccgtgaccgtgagctggaacagcggcgccctgaccagcggcgtgcacaccttccccgccgtgctgcagagcagcggcctgtacagcctgagcagcgtggtgaccgtgcccagcagcaacttcggcacccagacctacacctgcaacgtggaccacaagcccagcaacaccaaggtggacaagaccgtggagaggaagtgctgcgtggagtgccccccctgccccgccccccccgtggccggc

SEQ ID NO: 108 - DNA, 645 bp, Artificial Sequence
  synthetic construct; antibody fragment
gagatcgtgctgacccagagccccggcaccctgagcctgagccccggcgagagggccaccctgagctgcagggccagccagagcgtgagcagcagctacctggcctggtaccagcagaagcccggccaggcccccaggctgctgatctacggcaccagcagcagggccaccggcatccccgacaggttcagcggcagcggcagcggcaccgacttcaccctgaccatcagcaggctggagcccgaggacttcgccgtgtactactgccagcagtacggcagcagccccatcaccttcggccagggcaccaggctggagatcaagaggaccgtggccgcccccagcgtgttcatcttcccccccagcgacgagcagctgaagagcggcaccgccagcgtggtgtgcctgctgaacaacttctaccccagggaggccaaggtgcagtggaaggtggacaacgccctgcagagcggcaacagccaggagagcgtgaccgagcaggacagcaaggacagcacctacagcctgagcagcaccctgaccctgagcaaggccgactacgagaagcacaaggtgtacgcctgcgaggtgacccaccagggcctgagcagccccgtgaccaagagcttcaacaggggcgagtgc

SEQ ID NO: 109 - DNA, 723 bp, Artificial Sequence
  synthetic construct; antibody fragment
  misc_feature (661)..(723): /note="This region may be absent in its entirety"
  variation (670)..(672): /replace="ctg"
  misc_feature (673)..(723): /note="This region may be absent in its entirety"
  misc_feature (691)..(723): This region may be absent in its entirety
gaggtgcagctggtgcagagcggcgccgaggtgaagaagcccggcagcagcgtgaaggtgagctgcaaggccagcggcggcaccttcagcagctacgccatcagctgggtgaggcaggcccccggccagggcctggagtggatgggcggcatcggccccttcttcggcaccgccaactacgcccagaagttccagggcagggtgaccatcaccgccgacgagagcaccagcaccgcctacatggagctgagcagcctgaggagcgaggacaccgccgtgtactactgcgccagggacaccccctacttcgactactggggccagggcaccctggtgaccgtgagcagcgccagcaccaagggccccagcgtgttccccctggcccccagcagcaagagcaccagcggcggcaccgccgccctgggctgcctggtgaaggactacttccccgagcccgtgaccgtgagctggaacagcggcgccctgaccagcggcgtgcacaccttccccgccgtgctgcagagcagcggcctgtacagcctgagcagcgtggtgaccgtgcccagcagcagcctgggcacccagacctacatctgcaacgtgaaccacaagcccagcaacaccaaggtggacaagagggtggagcccaagagctgcgacaagacccacacctgccccccctgccccgcccccgaggccgccggcggccccagcgtgttcctg

SEQ ID NO: 110 - DNA, 642 bp, Artificial Sequence
  synthetic construct; antibody fragment
agctacgagctgacccagcccctgagcgtgagcgtggccctgggccagaccgccaggatcacctgcagcggcgacagcatccccaactactacgtgtactggtaccagcagaagcccggccaggcccccgtgctggtgatctacgacgacagcaacaggcccagcggcatccccgagaggttcagcggcagcaacagcggcaacaccgccaccctgaccatcagcagggcccaggccggcgacgaggccgactactactgccagagcttcgacagcagcctgaacgccgaggtgttcggcggcggcaccaagctgaccgtgctgggccagcccaaggccgcccccagcgtgaccctgttcccccccagcagcgaggagctgcaggccaacaaggccaccctggtgtgcctgatcagcgacttctaccccggcgccgtgaccgtggcctggaaggccgacagcagccccgtgaaggccggcgtggagaccaccacccccagcaagcagagcaacaacaagtacgccgccagcagctacctgagcctgacccccgagcagtggaagagccacaggagctacagctgccaggtgacccacgagggcagcaccgtggagaagaccgtggcccccaccgagtgcagc

SEQ ID NO: 111 - DNA, 729 bp, Artificial Sequence
  synthetic construct; antibody fragment
  misc_feature (667)..(729): This region may be absent in its entirety
  variation (676)..(678): /replace="ctg"
  misc_feature (679)..(729): /note="This region may be absent in its entirety"
  misc_feature (679)..(729): This region may be absent in its entirety
  misc_feature (697)..(729): /note="This region may be absent in its entirety"
gaggtgaagctggaggagagcggcggcggcctggtgcagcccggcggcagcatgaagctgagctgcgccgccagcggcttcaccttcagcgacgcctggatggactgggtgaggcagagccccgagaagggcctggagtgggtggccgagatcaggagcaaggccagcaaccacgccacctactacgccgagagcgtgaagggcaggttcaccatcagcagggacgacagcaagagcagcgtgtacctgcagatgaacagcctgagggccgaggacaccggcatctactactgcaccaggtggaggaggttcttcgacagctggggccagggcaccaccctgaccgtgagcagcgccagcaccaagggccccagcgtgttccccctggcccccagcagcaagagcaccagcggcggcaccgccgccctgggctgcctggtgaaggactacttccccgagcccgtgaccgtgagctggaacagcggcgccctgaccagcggcgtgcacaccttccccgccgtgctgcagagcagcggcctgtacagcctgagcagcgtggtgaccgtgcccagcagcagcctgggcacccagacctacatctgcaacgtgaaccacaagcccagcaacaccaaggtggacaagaaggtggagcccaagagctgcgacaagacccacacctgccccccctgccccgcccccgagctgctgggcggccccagcgtgttcctg

SEQ ID NO: 112 - DNA, 639 bp, Artificial Sequence
  synthetic construct; antibody fragment
cagatcgtgctgagccagagccccgccatcctgagcgccagccccggcgagaaggtgaccatgacctgcagggccagcagcagcgtgagctacatgcactggtaccagcagaagcccggcagcagccccaagccctggatctacgccaccagcaacctggccagcggcgtgcccgtgaggttcagcggcagcggcagcggcaccagctacagcctgaccatcagcagggtggaggccgaggacgccgccacctactactgccagcagtggagcagcaaccccctgaccttcggcgccggcaccaagctggagctgaagaggaccgtggccgcccccagcgtgttcatcttcccccccagcgacgagcagctgaagagcggcaccgccagcgtggtgtgcctgctgaacaacttctaccccagggaggccaaggtgcagtggaaggtggacaacgccctgcagagcggcaacagccaggagagcgtgaccgagcaggacagcaaggacagcacctacagcctgagcagcaccctgaccctgagcaaggccgactacgagaagcacaaggtgtacgcctgcgaggtgacccaccagggcctgagcagccccgtgaccaagagcttcaacaggggcgagtgc

SEQ ID NO: 113 - DNA, 738 bp, Artificial Sequence
  synthetic construct; antibody fragment
  misc_feature (676)..(738): This region may be absent in its entirety
  variation (685)..(687): /replace="ctg"
  misc_feature (688)..(738): This region may be absent in its entirety
  misc_feature (706)..(738): This region may be absent in its entirety
caggtgcagctggtgcagagcggcgccgagctgaagaagcccggcgccagcgtgaaggtgagctgcaagagcagcggctaccacttcaccagctactggatgcactgggtgaagcaggcccccggccagggcctggagtggatcggcgtgatccaccccaacagcggcagcatcaactacaacgagaagttcgagagcagggtgaccatcaccgtggacaagagcaccagcaccgcctacatggagctgagcagcctgaggagcgaggacaccgccgtgtactactgcgccggcgagagggacagcaccgaggtgctgcccatggactactggggccagggcaccaccgtgaccgtgagcagcgccagcaccaagggccccagcgtgttccccctggcccccagcagcaagagcaccagcggcggcaccgccgccctgggctgcctggtgaaggactacttccccgagcccgtgaccgtgagctggaacagcggcgccctgaccagcggcgtgcacaccttccccgccgtgctgcagagcagcggcctgtacagcctgagcagcgtggtgaccgtgcccagcagcagcctgggcacccagacctacatctgcaacgtgaaccacaagcccagcaacaccaaggtggacaagagggtggagcccaagagctgcgacaagacccacacctgccccccctgccccgcccccgagctgctgggcggccccagcgtgttcctg

SEQ ID NO: 114 - DNA, 642 bp, Artificial Sequence
  synthetic construct; antibody fragment
gacgtgcagatcacccagagccccagcagcctgagcgccagcctgggcgagagggccaccatcaactgcagggccagcaagagcatcaacaagtacctggcctggtaccagcagaagcccggcaaggcccccaagctgctgatctacagcggcagcaccctgcagagcggcatccccgccaggttcagcggcagcggcagcggcaccgacttcaccctgaccatcagcagcctggagcccgaggacttcgccatgtactactgccagcagcacaacgagtaccccctgaccttcggccagggcaccaagctggagatcaagaggaccgtggccgcccccagcgtgttcatcttcccccccagcgacgagcagctgaagagcggcaccgccagcgtggtgtgcctgctgaacaacttctaccccagggaggccaaggtgcagtggaaggtggacaacgccctgcagagcggcaacagccaggagagcgtgaccgagcaggacagcaaggacagcacctacagcctgagcagcaccctgaccctgagcaaggccgactacgagaagcacaaggtgtacgcctgcgaggtgacccaccagggcctgagcagccccgtgaccaagagcttcaacaggggcgagtgc

SEQ ID NO: 115 - DNA, 738 bp, Artificial Sequence
  synthetic construct; antibody fragment
  misc_feature (676)..(738): This region may be absent in its entirety
  variation (685)..(687): /replace="ctg"
  misc_feature (688)..(738): This region may be absent in its entirety
  misc_feature (706)..(738): This region may be absent in its entirety
gaggtgcagctggtggagagcggcggcggcctggtgcagcccggcaggagcctgaggctgagctgcgccgccagcggcttcaccttcgacgactacgccatgcactgggtgaggcaggcccccggcaagggcctggagtgggtgagcgccatcacctggaacagcggccacatcgactacgccgacagcgtggagggcaggttcaccatcagcagggacaacgccaagaacagcctgtacctgcagatgaacagcctgagggccgaggacaccgccgtgtactactgcgccaaggtgagctacctgagcaccgccagcagcctggactactggggccagggcaccctggtgaccgtgagcagcgccagcaccaagggccccagcgtgttccccctggcccccagcagcaagagcaccagcggcggcaccgccgccctgggctgcctggtgaaggactacttccccgagcccgtgaccgtgagctggaacagcggcgccctgaccagcggcgtgcacaccttccccgccgtgctgcagagcagcggcctgtacagcctgagcagcgtggtgaccgtgcccagcagcagcctgggcacccagacctacatctgcaacgtgaaccacaagcccagcaacaccaaggtggacaagaaggtggagcccaagagctgcgacaagacccacacctgccccccctgccccgcccccgagctgctgggcggccccagcgtgttcctg

SEQ ID NO: 116 - DNA, 642 bp, Artificial Sequence
  synthetic construct; antibody fragment
gacatccagatgacccagagccccagcagcctgagcgccagcgtgggcgacagggtgaccatcacctgcagggccagccagggcatcaggaactacctggcctggtaccagcagaagcccggcaaggcccccaagctgctgatctacgccgccagcaccctgcagagcggcgtgcccagcaggttcagcggcagcggcagcggcaccgacttcaccctgaccatcagcagcctgcagcccgaggacgtggccacctactactgccagaggtacaacagggccccctacaccttcggccagggcaccaaggtggagatcaagaggaccgtggccgcccccagcgtgttcatcttcccccccagcgacgagcagctgaagagcggcaccgccagcgtggtgtgcctgctgaacaacttctaccccagggaggccaaggtgcagtggaaggtggacaacgccctgcagagcggcaacagccaggagagcgtgaccgagcaggacagcaaggacagcacctacagcctgagcagcaccctgaccctgagcaaggccgactacgagaagcacaaggtgtacgcctgcgaggtgacccaccagggcctgagcagccccgtgaccaagagcttcaacaggggcgagtgc

SEQ ID NO: 117 - DNA, 735 bp, Artificial Sequence
  synthetic construct; antibody fragment
  misc_feature (673)..(735): This region may be absent in its entirety
  variation (682)..(684): /replace="ctg"
  misc_feature (685)..(735): This region may be absent in its entirety
  misc_feature (703)..(735): This region may be absent in its entirety
gaggtgaagctggaggagagcggcggcggcctggtgcagcccggcggcagcatgaagctgagctgcgtggccagcggcttcatcttcagcaaccactggatgaactgggtgaggcagagccccgagaagggcctggagtgggtggccgagatcaggagcaagagcatcaacagcgccacccactacgccgagagcgtgaagggcaggttcaccatcagcagggacgacagcaagagcgccgtgtacctgcagatgaccgacctgaggaccgaggacaccggcgtgtactactgcagcaggaactactacggcagcacctacgactactggggccagggcaccaccctgaccgtgagcagcgccagcaccaagggccccagcgtgttccccctggcccccagcagcaagagcaccagcggcggcaccgccgccctgggctgcctggtgaaggactacttccccgagcccgtgaccgtgagctggaacagcggcgccctgaccagcggcgtgcacaccttccccgccgtgctgcagagcagcggcctgtacagcctgagcagcgtggtgaccgtgcccagcagcagcctgggcacccagacctacatctgcaacgtgaaccacaagcccagcaacaccaaggtggacaagaaggtggagcccaagagctgcgacaagacccacacctgccccccctgccccgcccccgagctgctgggcggccccagcgtgttcctg

SEQ ID NO: 118 - DNA, 642 bp, Artificial Sequence
  synthetic construct; antibody fragment
gacatcctgctgacccagagccccgccatcctgagcgtgagccccggcgagagggtgagcttcagctgcagggccagccagttcgtgggcagcagcatccactggtaccagcagaggaccaacggcagccccaggctgctgatcaagtacgccagcgagagcatgagcggcatccccagcaggttcagcggcagcggcagcggcaccgacttcaccctgagcatcaacaccgtggagagcgaggacatcgccgactactactgccagcagagccacagctggcccttcaccttcggcagcggcaccaacctggaggtgaagaggaccgtggccgcccccagcgtgttcatcttcccccccagcgacgagcagctgaagagcggcaccgccagcgtggtgtgcctgctgaacaacttctaccccagggaggccaaggtgcagtggaaggtggacaacgccctgcagagcggcaacagccaggagagcgtgaccgagcaggacagcaaggacagcacctacagcctgagcagcaccctgaccctgagcaaggccgactacgagaagcacaaggtgtacgcctgcgaggtgacccaccagggcctgagcagccccgtgaccaagagcttcaacaggggcgagtgc

SEQ ID NO: 119 - DNA, 720 bp, Artificial Sequence
  synthetic construct; antibody fragment
  misc_feature (658)..(720): This region may be absent in its entirety
  variation (667)..(669): /replace="ctg"
  misc_feature (670)..(720): This region may be absent in its entirety
  misc_feature (688)..(720): This region may be absent in its entirety
agcaagctgcaggtgcagctggtggagagcggcggcggcgtggtgcagcccggcaggagcctgaggctgagctgcgccgccagcggcttcatcttcagcagctacgccatgcactgggtgaggcaggcccccggcaacggcctggagtgggtggccttcatgagctacgacggcagcaacaagaagtacgccgacagcgtgaagggcaggttcaccatcagcagggacaacagcaagaacaccctgtacctgcagatgaacagcctgagggccgaggacaccgccgtgtactactgcgccagggacaggggcatcgccgccggcggcaactactactactacggcatggacgtgtggggccagggcaccaccgtgaccgtgagcagcgccagcaccaagggccccagcgtgttccccctggcccccagcagcaagagcaccagcggcggcaccgccgccctgggctgcctggtgaaggactacttccccgagcccgtgaccgtgagctggaacagcggcgccctgaccagcggcgtgcacaccttccccgccgtgctgcagagcagcggcctgtacagcctgagcagcgtggtgaccgtgcccagcagcagcctgggcacccagacctacatctgcaacgtgaaccacaagcccagcaagacccacacctgccccccctgccccgcccccgagctgctgggcggccccagcgtgttcctg

SEQ ID NO: 120 - DNA, 654 bp, Artificial Sequence
  synthetic construct; antibody fragment
gccggcagcgagatcgtgctgacccagagccccgccaccctgagcctgagccccggcgagagggccaccctgagctgcagggccagccagagcgtgtacagctacctggcctggtaccagcagaagcccggccaggcccccaggctgctgatctacgacgccagcaacagggccaccggcatccccgccaggttcagcggcagcggcagcggcaccgacttcaccctgaccatcagcagcctggagcccgaggacttcgccgtgtactactgccagcagaggagcaactggccccccttcaccttcggccccggcaccaaggtggacatcaagaggaccgtggccgcccccagcgtgttcatcttcccccccagcgacgagcagctgaagagcggcaccgccagcgtggtgtgcctgctgaacaacttctaccccagggaggccaaggtgcagtggaaggtggacaacgccctgcagagcggcaacagccaggagagcgtgaccgagcaggacagcaaggacagcacctacagcctgagcagcaccctgaccctgagcaaggccgactacgagaagcacaaggtgtacgcctgcgaggtgacccaccagggcctgagcagccccgtgaccaagagcttcaacaggggcgagtgc

SEQ ID NO: 121 - DNA, 735 bp, Artificial Sequence
  synthetic construct; antibody fragment
  misc_feature (673)..(735): This region may be absent in its entirety
  variation (682)..(684): /replace="ctg"
  misc_feature (685)..(735): This region may be absent in its entirety
  misc_feature (703)..(735): This region may be absent in its entirety
gaggtgcagctggtgcagagcggcgccgaggtgaagaagcccggcgccagcgtgaaggtgagctgcaaggccagcggctacaccttcaccagccacggcatcagctgggtgaggcaggcccccggccagggcctggactggatgggctggatcagcccctacagcggcaacaccaactacgcccagaagctgcagggcagggtgaccatgaccaccgacaccagcaccagcaccgcctacatggagctgagcagcctgaggagcgaggacaccgccgtgtactactgcgccagggtgggcagcggcccctactactacatggacgtgtggggccagggcaccctggtgaccgtgagcagcgccagcaccaagggccccagcgtgttccccctggcccccagcagcaagagcaccagcggcggcaccgccgccctgggctgcctggtgaaggactacttccccgagcccgtgaccgtgagctggaacagcggcgccctgaccagcggcgtgcacaccttccccgccgtgctgcagagcagcggcctgtacagcctgagcagcgtggtgaccgtgcccagcagcagcctgggcacccagacctacatctgcaacgtgaaccacaagcccagcaacaccaaggtggacaagaaggtggagcccaagagctgcgacaagacccacacctgccccccctgccccgcccccgaggccgccggcggccccagcgtgttcctg

SEQ ID NO: 122 - DNA, 645 bp, Artificial Sequence
  synthetic construct; antibody fragment
cagagcgccctgacccagcccaggagcgtgagcggcagccccggccagagcgtgaccatcagctgcaccggcaccagcagcagcgtgggcgacagcatctacgtgagctggtaccagcagcaccccggcaaggcccccaagctgatgctgtacgacgtgaccaagaggcccagcggcgtgcccgacaggttcagcggcagcaagagcggcaacaccgccagcctgaccatcagcggcctgcaggccgaggacgaggccgactactactgctacagctacgccggcaccgacaccctgttcggcggcggcaccaaggtgaccgtgctgggccagcccaaggccgcccccagcgtgaccctgttcccccccagcagcgaggagctgcaggccaacaaggccaccctggtgtgcctgatcagcgacttctaccccggcgccgtgaccgtggcctggaaggccgacagcagccccgtgaaggccggcgtggagaccaccacccccagcaagcagagcaacaacaagtacgccgccagcagctacctgagcctgacccccgagcagtggaagagccacaggagctacagctgccaggtgacccacgagggcagcaccgtggagaagaccgtggcccccaccgagtgcagc

SEQ ID NO: 123 - DNA, 735 bp, Artificial Sequence
  synthetic construct; antibody fragment
  misc_feature (673)..(735): This region may be absent in its entirety
  variation (682)..(684): /replace="ctg"
  misc_feature (685)..(735): This region may be absent in its entirety
  misc_feature (703)..(735): This region may be absent in its entirety
caggtgcagctgcaggagagcggccccggcctggtgaagcccagcgagaccctgagcctgacctgcagcgtgagcggcggcagcatcatcagcaggagcagctactggggctggatcaggcagccccccggcaagggcctggagtggatcggcggcatctaccacagcggcaacacctacgacaaccccagcctgaagagcaggctgaccatgagcgtggacaccagcaagaaccagttcagcctgaacctgaggagcgtgaccgccgccgacaccgccgtgtactactgcgccaggatcgtgcccggcggcgacgccttcgacatctggggccagggcaccatggtgaccgtgagcagcgccagcaccaagggccccagcgtgttccccctggcccccagcagcaagagcaccagcggcggcaccgccgccctgggctgcctggtgaaggactacttccccgagcccgtgaccgtgagctggaacagcggcgccctgaccagcggcgtgcacaccttccccgccgtgctgcagagcagcggcctgtacagcctgagcagcgtggtgaccgtgcccagcagcagcctgggcacccagacctacatctgcaacgtgaaccacaagcccagcaacaccaaggtggacaagagggtggagcccaagagctgcgacaagacccacacctgccccccctgccccgcccccgagctgctgggcggccccagcgtgttcctg

SEQ ID NO: 124 - DNA, 639 bp, Artificial Sequence; identical to SEQ ID NO: 92
  synthetic construct; antibody fragment

SEQ ID NO: 125 - DNA, 726 bp, Artificial Sequence
  synthetic construct; antibody fragment
  misc_feature (664)..(726): This region may be absent in its entirety
  variation (673)..(675): /replace="ctg"
  misc_feature (676)..(726): This region may be absent in its entirety
  misc_feature (694)..(726): This region may be absent in its entirety
gaggtgcagctggtggagagcggcggcggcctgatccagcccggcggcagcctgaggctgagctgcgccgccagcggcttcaccttcagcaactacgccatgagctgggtgaggcaggcccccggcaagggcctggagtgggtgagcagcatcagcagcggcggcagcacctactaccccgacagcgtgaagggcaggttcaccatcagcagggacaacagcaagaacaccctgtacctgcagatgaacagcctgagggccgaggacaccgccgtgtactactgcgccaggtactactacggccagtacttcgacttctggggccagggcaccctggtgaccgtgagcagcgccagcaccaagggccccagcgtgttccccctggcccccagcagcaagagcaccagcggcggcaccgccgccctgggctgcctggtgaaggactacttccccgagcccgtgaccgtgagctggaacagcggcgccctgaccagcggcgtgcacaccttccccgccgtgctgcagagcagcggcctgtacagcctgagcagcgtggtgaccgtgcccagcagcagcctgggcacccagacctacatctgcaacgtgaaccacaagcccagcaacaccaaggtggacaagagggtggagcccaagagctgcgacaagacccacacctgccccccctgccccgcccccgagctgctgggcggccccagcgtgttcctg

SEQ ID NO: 126 - DNA, 642 bp, Artificial Sequence
  synthetic construct; antibody fragment
gacatcgtgatgacccagagccccagcagcctgagcgccagcgtgggcgacagggtgaccatcacctgcaaggccagccaggacgtgagcaccaccgtggcctggtaccagcagaagcccggcaaggcccccaagctgctgatctacagcgccagctacaggagcaccggcgtgcccagcaggttcagcggcagcggcagcggcaccgacttcaccctgaccatcagcagcctgcagcccgaggacttcgccgtgtactactgccagcagcactacagcacccccctgaccttcggcggcggcaccaaggtggagatcaagaggaccgtggccgcccccagcgtgttcatcttcccccccagcgacgagcagctgaagagcggcaccgccagcgtggtgtgcctgctgaacaacttctaccccagggaggccaaggtgcagtggaaggtggacaacgccctgcagagcggcaacagccaggagagcgtgaccgagcaggacagcaaggacagcacctacagcctgagcagcaccctgaccctgagcaaggccgactacgagaagcacaaggtgtacgcctgcgaggtgacccaccagggcctgagcagccccgtgaccaagagcttcaacaggggcgagtgc

SEQ ID NO: 127 - DNA, 723 bp, Artificial Sequence; identical to SEQ ID NO: 109
  synthetic construct; antibody fragment
  misc_feature (661)..(723): This region may be absent in its entirety
  variation (669)..(672): /replace="ctg"
  misc_feature (673)..(723): This region may be absent in its entirety
  misc_feature (691)..(723): This region may be absent in its entirety

SEQ ID NO: 128 - DNA, 642 bp, Artificial Sequence; identical to SEQ ID NO: 110
  synthetic construct; antibody fragment

SEQ ID NO: 129 - DNA, 705 bp, Artificial Sequence
  synthetic construct; antibody fragment
  misc_feature (673)..(705): This region may be absent in its entirety
  misc_feature (691)..(705): This region may be absent in its entirety
caggtgcagctgcaggagagcggccccggcctggtgaagcccagcgagaccctgagcctgacctgcgccgtgagcggccacagcatcagccacgaccacgcctggagctgggtgaggcagccccccggcgagggcctggagtggatcggcttcatcagctacagcggcatcaccaactacaaccccagcctgcagggcagggtgaccatcagcagggacaacagcaagaacaccctgtacctgcagatgaacagcctgagggccgaggacaccgccgtgtactactgcgccaggagcctggccaggaccaccgccatggactactggggcgagggcaccctggtgaccgtgagcagcgccagcaccaagggccccagcgtgttccccctggcccccagcagcaagagcaccagcggcggcaccgccgccctgggctgcctggtgaaggactacttccccgagcccgtgaccgtgagctggaacagcggcgccctgaccagcggcgtgcacaccttccccgccgtgctgcagagcagcggcctgtacagcctgagcagcgtggtgaccgtgcccagcagcaacttcggcacccagacctacacctgcaacgtggaccacaagcccagcaacaccaaggtggacaagaccgtggagaggaagagctgcgtggagtgccccccctgccccgccccccccgtggccggc

SEQ ID NO: 130 - DNA, 642 bp, Artificial Sequence
  synthetic construct; antibody fragment
gacatccagatgacccagagccccagcagcctgagcgccagcgtgggcgacagcgtgaccatcacctgccaggccagcaccgacatcagcagccacctgaactggtaccagcagaagcccggcaaggcccccgagctgctgatctactacggcagccacctgctgagcggcgtgcccagcaggttcagcggcagcggcagcggcaccgacttcaccttcaccatcagcagcctggaggccgaggacgccgccacctactactgcggccagggcaacaggctgccctacaccttcggccagggcaccaaggtggagatcgagaggaccgtggccgcccccagcgtgttcatcttcccccccagcgacgagcagctgaagagcggcaccgccagcgtggtgtgcctgctgaacaacttctaccccagggaggccaaggtgcagtggaaggtggacaacgccctgcagagcggcaacagccaggagagcgtgaccgagcaggacagcaaggacagcacctacagcctgagcagcaccctgaccctgagcaaggccgactacgagaagcacaaggtgtacgcctgcgaggtgacccaccagggcctgagcagccccgtgaccaagagcttcaacaggggcgagtgc

SEQ ID NO: 131 - DNA, 723 bp, Artificial Sequence
  synthetic construct; antibody fragment
  misc_feature (661)..(723): This region may be absent in its entirety
  variation (670)..(672): /replace="ctg"
  misc_feature (673)..(723): This region may be absent in its entirety
  misc_feature (691)..(723): This region may be absent in its entirety
gaggtgcagctggtggagagcggcggcggcctggtgcagcccggcaggagcctgaggctgagctgcgccgccagcaggttcaccttcgacgactacgccatgcactgggtgaggcaggcccccggcaagggcctggagtgggtgagcggcatcagctggaacagcggcaggatcggctacgccgacagcgtgaagggcaggttcaccatcagcagggacaacgccgagaacagcctgttcctgcagatgaacggcctgagggccgaggacaccgccctgtactactgcgccaagggcagggacagcttcgacatctggggccagggcaccatggtgaccgtgagcagcgccagcaccaagggccccagcgtgttccccctggcccccagcagcaagagcaccagcggcggcaccgccgccctgggctgcctggtgaaggactacttccccgagcccgtgaccgtgagctggaacagcggcgccctgaccagcggcgtgcacaccttccccgccgtgctgcagagcagcggcctgtacagcctgagcagcgtggtgaccgtgcccagcagcagcctgggcacccagacctacatctgcaacgtgaaccacaagcccagcaacaccaaggtggacaagaaggtggagcccaagagctgcgacaagacccacacctgccccccctgccccgcccccgagctgctgggcggccccagcgtgttcctg

SEQ ID NO: 132 - DNA, 642 bp, Artificial Sequence
  synthetic construct; antibody fragment
gacatccagatgacccagagccccagcagcgtgagcgccagcgtgggcgacagggtgaccatcacctgcagggccagccagggcatcagcagctggctggcctggtaccagcagaagcccggcaaggcccccaagctgctgatctacggcgccagcagcctggagagcggcgtgcccagcaggttcagcggcagcggcagcggcaccgacttcaccctgaccatcagcagcctgcagcccgaggacttcgccagctactactgccagcaggccaacagcttcccctacaccttcggccagggcaccaagctggagatcaagaggaccgtggccgcccccagcgtgttcatcttcccccccagcgacgagcagctgaagagcggcaccgccagcgtggtgtgcctgctgaacaacttctaccccagggaggccaaggtgcagtggaaggtggacaacgccctgcagagcggcaacagccaggagagcgtgaccgagcaggacagcaaggacagcacctacagcctgagcagcaccctgaccctgagcaaggccgactacgagaagcacaaggtgtacgcctgcgaggtgacccaccagggcctgagcagccccgtgaccaagagcttcaacaggggcgagtgc

SEQ ID NO: 133 - DNA, 738 bp, Artificial Sequence
  synthetic construct; antibody fragment
  misc_feature (676)..(738): This region may be absent in its entirety
  variation (685)..(687): /replace="ctg"
  misc_feature (688)..(738): This region may be absent in its entirety
  misc_feature (706)..(738): This region may be absent in its entirety
gaggtgcagctggtggagagcggcggcggcctggtgcagcccggcggcagcctgaggctgagctgcgccgccagcggcttcaccttcagcagcagctggatgaactgggtgaggcaggcccccggcaagggcctggagtgggtgggcaggatctaccccggcgacggcgacaccaactacaacgtgaagttcaagggcaggttcaccatcagcagggacgacagcaagaacagcctgtacctgcagatgaacagcctgaagaccgaggacaccgccgtgtactactgcgccaggagcggcttcatcaccaccgtgagggacttcgactactggggccagggcaccctggtgaccgtgagcagcgccagcaccaagggccccagcgtgttccccctggcccccagcagcaagagcaccagcggcggcaccgccgccctgggctgcctggtgaaggactacttccccgagcccgtgaccgtgagctggaacagcggcgccctgaccagcggcgtgcacaccttccccgccgtgctgcagagcagcggcctgtacagcctgagcagcgtggtgaccgtgcccagcagcagcctgggcacccagacctacatctgcaacgtgaaccacaagcccagcaacaccaaggtggacaagagggtggagcccaagagctgcgacaagacccacacctgccccccctgccccgcccccgagctgctgggcggccccagcgtgttcctg

SEQ ID NO: 134 - DNA, 654 bp, Artificial Sequence
  synthetic construct; antibody fragment
gagatcgtgctgacccagagccccgacttccagagcgtgacccccaaggagaaggtgaccatcacctgcagggccagcgagagcgtggacaccttcggcatcagcttcatgaactggttccagcagaagcccgaccagagccccaagctgctgatccacgaggccagcaaccagggcagcggcgtgcccagcaggttcagcggcagcggcagcggcaccgacttcaccctgaccatcaacagcctggaggccgaggacgccgccacctactactgccagcagagcaaggaggtgcccttcaccttcggcggcggcaccaaggtggagatcaagaggaccgtggccgcccccagcgtgttcatcttcccccccagcgacgagcagctgaagagcggcaccgccagcgtggtgtgcctgctgaacaacttctaccccagggaggccaaggtgcagtggaaggtggacaacgccctgcagagcggcaacagccaggagagcgtgaccgagcaggacagcaaggacagcacctacagcctgagcagcaccctgaccctgagcaaggccgactacgagaagcacaaggtgtacgcctgcgaggtgacccaccagggcctgagcagccccgtgaccaagagcttcaacaggggcgagtgc

SEQ ID NO: 135 - DNA, 726 bp, Artificial Sequence
  synthetic construct; antibody fragment
  misc_feature (664)..(726): This region may be absent in its entirety
  variation (673)..(675): /replace="ctg"
  misc_feature (676)..(726): This region may be absent in its entirety
  misc_feature (694)..(726): This region may be absent in its entirety
gaggtgcagctggtggagagcggcggcggcctggtgcagcccggcggcagcctgaggctgagctgcgccgccagcggcttcttcatcaccaacaactactggggctgggtgaggcaggcccccggcaagggcctggagtgggtgggctacatcagctacagcggcagcaccagctacaaccccagcctgaagagcaggttcaccatcagcagggacaccagcaagaacaccttctacctgcagatgaacagcctgagggccgaggacaccgccgtgtactactgcgccaggaccggcagcagcggctacttcgacttctggggccagggcaccctggtgaccgtgagcagcgccagcaccaagggccccagcgtgttccccctggcccccagcagcaagagcaccagcggcggcaccgccgccctgggctgcctggtgaaggactacttccccgagcccgtgaccgtgagctggaacagcggcgccctgaccagcggcgtgcacaccttccccgccgtgctgcagagcagcggcctgtacagcctgagcagcgtggtgaccgtgcccagcagcagcctgggcacccagacctacatctgcaacgtgaaccacaagcccagcaacaccaaggtggacaagaaggtggagcccaagagctgcgacaagacccacacctgccccccctgccccgcccccgagctgctgggcggccccagcgtgttcctg

SEQ ID NO: 136 - DNA, 642 bp, Artificial Sequence
  synthetic construct; antibody fragment
gacatccagatgacccagagccccagcagcctgagcgccagcgtgggcgacagggtgaccatcacctgcagggccagcgagagcgtggacgacctgctgcactggtaccagcagaagcccggcaaggcccccaagctgctgatcaagtacgccagccagagcatcagcggcgtgcccagcaggttcagcggcagcggcagcggcaccgacttcaccctgaccatcagcagcctgcagcccgaggacttcgccacctactactgccagcagggcaacagcctgcccaacaccttcggccagggcaccaaggtggagatcaagaggaccgtggccgcccccagcgtgttcatcttcccccccagcgacgagcagctgaagagcggcaccgccagcgtggtgtgcctgctgaacaacttctaccccagggaggccaaggtgcagtggaaggtggacaacgccctgcagagcggcaacagccaggagagcgtgaccgagcaggacagcaaggacagcacctacagcctgagcagcaccctgaccctgagcaaggccgactacgagaagcacaaggtgtacgcctgcgaggtgacccaccagggcctgagcagccccgtgaccaagagcttcaacaggggcgagtgc

SEQ ID NO: 137 - DNA, 717 bp, Artificial Sequence
  synthetic construct; antibody fragment
  misc_feature (685)..(717): This region may be absent in its entirety
  misc_feature (703)..(717): This region may be absent in its entirety
gaggtgcagctggtgcagagcggcgccgaggtgaagaagcccggcgccagcgtgaaggtgagctgcaaggccagcggctacaccttcaccgactacaacatgcactgggtgaggcaggcccccggccagggcctggagtggatgggcgagatcaaccccaacagcggcggcgccggctacaaccagaagttcaagggcagggtgaccatgaccaccgacaccagcaccagcaccgcctacatggagctgaggagcctgaggagcgacgacaccgccgtgtactactgcgccaggctgggctacgacgacatctacgacgactggtacttcgacgtgtggggccagggcaccaccgtgaccgtgagcagcgccagcaccaagggccccagcgtgttccccctggccccctgcagcaggagcaccagcgagagcaccgccgccctgggctgcctggtgaaggactacttccccgagcccgtgaccgtgagctggaacagcggcgccctgaccagcggcgtgcacaccttccccgccgtgctgcagagcagcggcctgtacagcctgagcagcgtggtgaccgtgcccagcagcaacttcggcacccagacctacacctgcaacgtggaccacaagcccagcaacaccaaggtggacaagaccgtggagaggaagtgctgcgtggagtgccccccctgccccgccccccccgtggccggc

SEQ ID NO: 138 - DNA, 642 bp, Artificial Sequence
  synthetic construct; antibody fragment
gacatccagatgacccagagccccagcagcctgagcgccagcgtgggcgacagggtgaccatcacctgcagggccagccaggacatcagcaactacctgaactggtaccagcagaagcccggcaaggcccccaagctgctgatctactacaccagcaggctgctgagcggcgtgcccagcaggttcagcggcagcggcagcggcaccgacttcaccctgaccatcagcagcctgcagcccgaggacttcgccacctactactgccagcagggcgacaccctgccctacaccttcggcggcggcaccaaggtggagatcaagaggaccgtggccgcccccagcgtgttcatcttcccccccagcgacgagcagctgaagagcggcaccgccagcgtggtgtgcctgctgaacaacttctaccccagggaggccaaggtgcagtggaaggtggacaacgccctgcagagcggcaacagccaggagagcgtgaccgagcaggacagcaaggacagcacctacagcctgagcagcaccctgaccctgagcaaggccgactacgagaagcacaaggtgtacgcctgcgaggtgacccaccagggcctgagcagccccgtgaccaagagcttcaacaggggcgagtgc

SEQ ID NO: 139 - DNA, 741 bp, Artificial Sequence
  synthetic construct; antibody fragment
  misc_feature (679)..(741): This region may be absent in its entirety
  variation (688)..(690): /replace="ctg"
  misc_feature (691)..(741): This region may be absent in its entirety
  misc_feature (709)..(741): This region may be absent in its entirety
gaggtgcagctgctggagagcggcggcggcctggtgcagcccggcggcagcctgaggctgagctgcgccgccagcggcttcaccttcagccactacatcatgatgtgggtgaggcaggcccccggcaagggcctggagtgggtgagcggcatctacagcagcggcggcatcaccgtgtacgccgacagcgtgaagggcaggttcaccatcagcagggacaacagcaagaacaccctgtacctgcagatgaacagcctgagggccgaggacaccgccgtgtactactgcgcctacaggaggatcggcgtgcccaggagggacgagttcgacatctggggccagggcaccatggtgaccgtgagcagcgccagcaccaagggccccagcgtgttccccctggcccccagcagcaagagcaccagcggcggcaccgccgccctgggctgcctggtgaaggactacttccccgagcccgtgaccgtgagctggaacagcggcgccctgaccagcggcgtgcacaccttccccgccgtgctgcagagcagcggcctgtacagcctgagcagcgtggtgaccgtgcccagcagcagcctgggcacccagacctacatctgcaacgtgaaccacaagcccagcaacaccaaggtggacaagagggtggagcccaagagctgcgacaagacccacacctgccccccctgccccgcccccgagctgctgggcggccccagcgtgttcctg

SEQ ID NO: 140 - DNA, 639 bp, Artificial Sequence
  synthetic construct; antibody fragment
gacatccagatgacccagagccccagcaccctgagcgccagcgtgggcgacagggtgaccatcacctgcagggccagccagagcatcagcagctggctggcctggtaccagcagaagcccggcaaggcccccaagctgctgatctacaaggccagcaccctggagagcggcgtgcccagcaggttcagcggcagcggcagcggcaccgagttcaccctgaccatcagcagcctgcagcccgacgacttcgccacctactactgccagcagtacaacacctactggaccttcggccagggcaccaaggtggagatcaagaggaccgtggccgcccccagcgtgttcatcttcccccccagcgacgagcagctgaagagcggcaccgccagcgtggtgtgcctgctgaacaacttctaccccagggaggccaaggtgcagtggaaggtggacaacgccctgcagagcggcaacagccaggagagcgtgaccgagcaggacagcaaggacagcacctacagcctgagcagcaccctgaccctgagcaaggccgactacgagaagcacaaggtgtacgcctgcgaggtgacccaccagggcctgagcagccccgtgaccaagagcttcaacaggggcgagtgc

SEQ ID NO: 141 - DNA, 2205 bp, Artificial Sequence
  synthetic construct; antibody fragment
atgtaccggatgcagctgctgctgctcattgccctgtctctggccctggtcaccaatagcgaagtccagctgctggaatctggcggcggacttgttcaacctggcggctctctgagactgagctgtgccgcttccggcttcaccttcagccactatatcatgatgtgggtccgacaggcccctggcaaaggccttgaatgggtgtccggcatctatagcagcggcggcatcacagtgtacgccgactctgtgaagggcagattcaccatcagccgggacaacagcaagaacaccctgtacctgcagatgaacagcctgagagccgaggacaccgccgtgtactactgcgcctatagaagaatcggcgtgcccagacgggacgagttcgatatttggggccagggcaccatggtcaccgtgtctagcgcctctacaaagggccctagcgtgttccctctggctcctagcagcaagagcacaagcggaggaacagccgctctgggctgtctggtcaaggactactttcccgagcctgtgaccgtgtcctggaatagcggagcactgacaagcggcgtgcacacctttccagctgtgctgcaaagcagcggcctgtactctctgagcagcgtggtcacagtgccaagctctagcctgggcacccagacctacatctgcaatgtgaaccacaagcctagcaacaccaaggtggacaagagagtggaacccaagagctgcgacaagacccacacctgtcctccatgtcctgctccagaactgctcggcggaccttccgtgttcctgtttcctccaaagcctaaggacaccctgatgatcagcagaacccctgaagtgacctgcgtggtggtggatgtgtcccacgaggatcccgaagtgaagttcaattggtacgtggacggcgtggaagtgcacaacgccaagaccaagcctagagaggaacagtacaacagcacctacagagtggtgtccgtgctgaccgtgctgcaccaggattggctgaacggcaaagagtacaagtgcaaggtgtccaacaaggccctgcctgctcctatcgagaaaaccatcagcaaggccaagggccagcctagggaaccccaggtttacacactgcctccaagccgggaagagatgaccaagaaccaggtgtccctgacctgcctcgtgaagggcttctacccttccgatatcgccgtggaatgggagagcaatggccagccagagaacaactacaagacaacccctcctgtgctggacagcgacggctcattcttcctgtacagcaagctgacagtggacaagtccagatggcagcagggcaacgtgttcagctgcagcgtgatgcacgaggccctgcacaaccactacacccagaagagtctgagcctgtctccaggcctgcggaagagaagggctcctgtgaagcagaccctgaacttcgacctgctgaaactggccggcgacgtggaaagcaaccccggacctatgtatagaatgcagctcctcctgctgatcgcactgagcctggctctcgtgaccaacagcgacatccagatgacacagagccccagcacactgtctgccagcgtgggagacagagtgaccatcacctgtagagccagccagtccatctcctcttggctggcctggtatcagcaaaagcctggcaaggcccctaagctgctgatctacaaggcctccacactggaaagcggggtgccctccagattttctggcagcggatctggcaccgagttcaccctgaccatcagtagcctgcagcctgacgacttcgccacctactactgccagcagtacaatacctactggaccttcggccagggaacaaaggtggaaatcaagcggactgtggccgctccaagcgtgttcatctttccacctagcgacgagcagctgaagtccggcacagcctctgttgtgtgcctgctgaacaacttctaccccagagaagccaaggtgcagtggaaagtggacaatgccctgcagagcggcaactcccaagagagcgtgacagagcaggactccaaggattccacctacagcctgtctagcaccctgacactgagcaaggccgactacgagaagcacaaagtgtatgcctgcgaagtgacccaccagggccttagctctccagtgaccaagagcttcaaccggggcgagtgttgataa

SEQ ID NO: 142 - skipped

SEQ ID NO: 143 - protein, 738 aa, Adeno-associated virus 8
MAADGYLPDWLEDNLSEGIREWWALKPGAPKPKANQQKQDDGRGLVLPGYKYLGPFNGLDKGEPVNAADAAALEHDKAYDQQLQAGDNPYLRYNHADAEFQERLQEDTSFGGNLGRAVFQAKKRVLEPLGLVEEGAKTAPGKKRPVEPSPQRSPDSSTGIGKKGQQPARKRLNFGQTGDSESVPDPQPLGEPPAAPSGVGPNTMAAGGGAPMADNNEGADGVGSSSGNWHCDSTWLGDRVITTSTRTWALPTYNNHLYKQISNGTSGGATNDNTYFGYSTPWGYFDFNRFHCHFSPRDWQRLINNNWGFRPKRLSFKLFNIQVKEVTQNEGTKTIANNLTSTIQVFTDSEYQLPYVLGSAHQGCLPPFPADVFMIPQYGYLTLNNGSQAVGRSSFYCLEYFPSQMLRTGNNFQFTYTFEDVPFHSSYAHSQSLDRLMNPLIDQYLYYLSRTQTTGGTANTQTLGFSQGGPNTMANQAKNWLPGPCYRQQRVSTTTGQNNNSNFAWTAGTKYHLNGRNSLANPGIAMATHKDDEERFFPSNGILIFGKQNAARDNADYSDVMLTSEEEIKTTNPVATEEYGIVADNLQQQNTAPQIGTVNSQGALPGMVWQNRDVYLQGPIWAKIPHTDGNFHPSPLMGGFGLKHPPPQILIKNTPVPADPPTTFNQSKLNSFITQYSTGQVSVEIEWELQKENSKRWNPEIQYTSNYYKSTSVDFAVNTEGVYSEPRPIGTRYLTRNL

SEQ ID NO: 144 - protein, 736 aa, Adeno-associated virus 9
MAADGYLPDWLEDNLSEGIREWWALKPGAPQPKANQQHQDNARGLVLPGYKYLGPGNGLDKGEPVNAADAAALEHDKAYDQQLKAGDNPYLKYNHADAEFQERLKEDTSFGGNLGRAVFQAKKRLLEPLGLVEEAAKTAPGKKRPVEQSPQEPDSSAGIGKSGAQPAKKRLNFGQTGDTESVPDPQPIGEPPAAPSGVGSLTMASGGGAPVADNNEGADGVGSSSGNWHCDSQWLGDRVITTSTRTWALPTYNNHLYKQISNSTSGGSSNDNAYFGYSTPWGYFDFNRFHCHFSPRDWQRLINNNWGFRPKRLNFKLFNIQVKEVTDNNGVKTIANNLTSTVQVFTDSDYQLPYVLGSAHEGCLPPFPADVFMIPQYGYLTLNDGSQAVGRSSFYCLEYFPSQMLRTGNNFQFSYEFENVPFHSSYAHSQSLDRLMNPLIDQYLYYLSKTINGSGQNQQTLKFSVAGPSNMAVQGRNYIPGPSYRQQRVSTTVTQNNNSEFAWPGASSWALNGRNSLMNPGPAMASHKEGEDRFFPLSGSLIFGKQGTGRDNVDADKVMITNEEEIKTTNPVATESYGQVATNHQSAQAQAQTGWVQNQGILPGMVWQDRDVYLQGPIWAKIPHTDGNFHPSPLMGGFGMKHPPPQILIKNTPVPADPPTAFNKDKLNSFITQYSTGQVSVEIEWELQKENSKRWNPEIQYTSNYYKSNNVEFAVNTEGVYSEPRPIGTRYLTRNL

SEQ ID NO: 145 - protein, 738 aa, Artificial Sequence
  synthetic construct; AAV vector
MAADGYLPDWLEDNLSEGIREWWDLKPGAPKPKANQQKQDDGRGLVLPGYKYLGPFNGLDKGEPVNAADAAALEHDKAYDQQLKAGDNPYLRYNHADAEFQERLQEDTSFGGNLGRAVFQAKKRVLEPLGLVEEGAKTAPGKKRPVEPSPQRSPDSSTGIGKKGQQPAKKRLNFGQTGDSESVPDPQPIGEPPAGPSGLGSGTMAAGGGAPMADNNEGADGVGSSSGNWHCDSTWLGDRVITTSTRTWALPTYNNHLYKQISNGTSGGSTNDNTYFGYSTPWGYFDFNRFHCHFSPRDWQRLINNNWGFRPKRLNFKLFNIQVKEVTQNEGTKTIANNLTSTIQVFTDSEYQLPYVLGSAHQGCLPPFPADVFMIPQYGYLTLNNGSQAVGRSSFYCLEYFPSQMLRTGNNFEFSYQFEDVPFHSSYAHSQSLDRLMNPLIDQYLYYLSRTQSTGGTAGTQQLLFSQAGPNNMSAQAKNWLPGPCYRQQRVSTTLSQNNNSNFAWTGATKYHLNGRDSLVNPGVAMATHKDDEERFFPSSGVLMFGKQGAGKDNVDYSSVMLTSEEEIKTTNPVATEQYGVVADNLQQQNAAPIVGAVNSQGALPGMVWQNRDVYLQGPIWAKIPHTDGNFHPSPLMGGFGLKHPPPQILIKNTPVPADPPTTFSQAKLASFITQYSTGQVSVEIEWELQKENSKRWNPEIQYTSNYYKSTNVDFAVNTDGTYSEPRPIGTRYLTRNL

SEQ ID NO: 146 - protein, 20 aa, Artificial Sequence
  synthetic construct; signal peptide
MYRMQLLLLIALSLALVTNS

SEQ ID NO: 147 - protein, 26 aa, Unknown
  synthetic construct; signal peptide
MNFLLSWVHWSLALLLYLHHAKWSQA

SEQ ID NO: 148 - protein, 29 aa, Unknown
  synthetic construct; signal peptide
MERAAPSRRVPLPLLLLGGLALLAAGVDA

SEQ ID NO: 149 - protein, 19 aa, Unknown
  synthetic construct; signal peptide
MAPLRPLLILALLAWVALA

SEQ ID NO: 150 - protein, 18 aa, Unknown
  synthetic construct; signal peptide
MRLLAKIICLMLWAICVA

SEQ ID NO: 151 - protein, 19 aa, Unknown
  synthetic construct; signal peptide
MRLLAFLSLLALVLQETGT

SEQ ID NO: 152 - protein, 18 aa, Unknown
  synthetic construct; signal peptide
MKWVTFISLLFLFSSAYS

SEQ ID NO: 153 - protein, 18 aa, Unknown
  synthetic construct; signal peptide
MAFLWLLSCWALLGTTFG

SEQ ID NO: 154 - protein, 20 aa, Unknown
  synthetic construct; signal peptide
MYRMQLLSCIALILALVTNS

SEQ ID NO: 155 - protein, 15 aa, Unknown
  synthetic construct; signal peptide
MNLLLILTFVAAAVA

SEQ ID NO: 156 - protein, 17 aa, Homo sapiens
MRAWIFFLLCLAGRALA

SEQ ID NO: 157 - protein, 22 aa, Homo sapiens
MFSFVDLRLLLLLAATALLTHG

SEQ ID NO: 158 - protein, 19 aa, Homo sapiens
MKLVFLVLLFLGALGLCLA

SEQ ID NO: 159 - protein, 22 aa, Homo sapiens
MGPTSGPSLLLLLLTHLPLALG

SEQ ID NO: 160 - protein, 18 aa, Homo sapiens
MSLSAFTLFLALIGGTSG

SEQ ID NO: 161 - protein, 27 aa, Homo sapiens
MAPHRPAPALLCALSLALCALSLPVRA

SEQ ID NO: 162 - protein, 22 aa, Homo sapiens
MWATLPLLCAGAWLLGVPVCGA

SEQ ID NO: 163 - protein, 19 aa, Homo sapiens
MQALVLLLCIGALLGHSSC

SEQ ID NO: 164 - protein, 23 aa, Homo sapiens
MQMSPALTCLVLGLALVFGEGSA

SEQ ID NO: 165 - protein, 20 aa, Homo sapiens
MQPSSLLPLALCLLAAPASA

SEQ ID NO: 166 - protein, 23 aa, Homo sapiens
MAPFEPLASGILLLLWLIAPSRA

SEQ ID NO: 167 - protein, 31 aa, Homo sapiens
MLRGPGPGLLLLAVQCLGTAVPSTGASKSKR

SEQ ID NO: 168 - protein, 15 aa, Homo sapiens
MWCIVLFSLLAWVYA

SEQ ID NO: 169 - protein, 17 aa, Homo sapiens
MNPTLILAAFCLGIASA

SEQ ID NO: 170 - protein, 17 aa, Homo sapiens
MWQLWASLCCLLVLANA

SEQ ID NO: 171 - protein, 16 aa, Homo sapiens
MLLILLSVALLAFSSA

SEQ ID NO: 172 - protein, 20 aa, Homo sapiens
MWKRWLALALALVAVAWVRA

SEQ ID NO: 173 - protein, 18 aa, Homo sapiens
MKWVTFISLLFLFSSAYS

SEQ ID NO: 174 - protein, 24 aa, Homo sapiens
MPSSVSWGILLLAGLCCLVPVSLA

SEQ ID NO: 175 - protein, 18 aa, Homo sapiens
MKAAVLTLAVLFLTGSQA

SEQ ID NO: 176 - protein, 18 aa, Homo sapiens
MKLLAATVLLLTICSLEG

SEQ ID NO: 177 - protein, 27 aa, Homo sapiens
MDPPRPALLALLALPALLLLLLAGARA

SEQ ID NO: 178 - protein, 28 aa, Homo sapiens
MQRVNMIMAESPGLITICLLGYLLSAEC

SEQ ID NO: 179 - protein, 20 aa, Homo sapiens
MGPLMVLFCLLFLYPGLADS

SEQ ID NO: 180 - protein, 18 aa, Homo sapiens
MWLLVSVILISRISSVGG

SEQ ID NO: 181 - protein, 18 aa, Homo sapiens
MLLLFSVILISWVSTVGG

SEQ ID NO: 182 - protein, 19 aa, Homo sapiens
MFSMRIVCLVLSVVGTAWT

SEQ ID NO: 183 - protein, 30 aa, Homo sapiens
MKRMVSWSFHKLKTMKHLLLLLLCVFLVKS

SEQ ID NO: 184 - protein, 26 aa, Homo sapiens
MSWSLHPRNLILYFYALLFLSSTCVA

SEQ ID NO: 185 - protein, 18 aa, Homo sapiens
MKSLVLLLCLAQLWGCHS

SEQ ID NO: 186 - protein, 23 aa, Homo sapiens
MARVLGAPVALGLWSLCWSLAIA

SEQ ID NO: 187 - protein, 18 aa, Homo sapiens
MKLITILFLCSRLLLSLT

SEQ ID NO: 188 - protein, 20 aa, Homo sapiens
MSLFPSLPLLLLSMVAASYS

SEQ ID NO: 189 - protein, 19 aa, Homo sapiens
MEHKEVVLLLLLFLKSGQG

SEQ ID NO: 190 - protein, 24 aa, Homo sapiens
MAHVRGLQLPGCLALAALCSLVHS

SEQ ID NO: 191 - protein, 29 aa, Homo sapiens
MISRMEKMTMMMKILIMFALGMNYWSCSG

SEQ ID NO: 192 - protein, 32 aa, Homo sapiens
MYSNVIGTVTSGKRKVYLLSLLLIGFWDCVTC

SEQ ID NO: 193 - protein, 19 aa, Homo sapiens
MRLAVGALLVCAVLGLCLA

SEQ ID NO: 194 - protein, 22 aa, Artificial Sequence
  synthetic construct; antibody fragment
EPKSCDKTHTCPPCPAPELLGG

SEQ ID NO: 195 - protein, 22 aa, Artificial Sequence
  synthetic construct; antibody fragment
EPKSCDKTHLCPPCPAPELLGG

SEQ ID NO: 196 - protein, 10 aa, Artificial Sequence
  synthetic construct; antibody fragment
EPKSCDKTHL

SEQ ID NO: 197 - protein, 10 aa, Artificial Sequence
  synthetic construct; antibody fragment
EPKSCDKTHT

SEQ ID NO: 198 - protein, 16 aa, Artificial Sequence
  synthetic construct; antibody fragment
EPKSCDKTHTCPPCPA

SEQ ID NO: 199 - protein, 16 aa, Artificial Sequence
  synthetic construct; antibody fragment
EPKSCDKTHLCPPCPA

SEQ ID NO: 200 - protein, 27 aa, Artificial Sequence
  synthetic construct; antibody fragment
EPKSCDKTHTCPPCPAPELLGGPSVFL

SEQ ID NO: 201 - protein, 27 aa, Artificial Sequence
  synthetic construct; antibody fragment
EPKSCDKTHLCPPCPAPELLGGPSVFL

SEQ ID NO: 202 - protein, 22 aa, Artificial Sequence
  synthetic construct; antibody fragment
EPKSCDKTHTCPPCPAPELAGA

SEQ ID NO: 203 - protein, 22 aa, Artificial Sequence
  synthetic construct; antibody fragment
EPKSCDKTHLCPPCPAPELAGA

SEQ ID NO: 204 - protein, 27 aa, Artificial Sequence
  synthetic construct; antibody fragment
EPKSCDKTHTCPPCPAPELAGAPSVFL

SEQ ID NO: 205 - protein, 27 aa, Artificial Sequence
  synthetic construct; antibody fragment
EPKSCDKTHLCPPCPAPELAGAPSVFL

SEQ ID NO: 206 - protein, 22 aa, Artificial Sequence
  synthetic construct; antibody fragment
EPKSCDKTHTCPPCPAPEFEGG

SEQ ID NO: 207 - protein, 22 aa, Artificial Sequence
  synthetic construct; antibody fragment
EPKSCDKTHLCPPCPAPEFEGG

SEQ ID NO: 208 - protein, 27 aa, Artificial Sequence
  synthetic construct; antibody fragment
EPKSCDKTHTCPPCPAPEFEGGPSVFL

SEQ ID NO: 209 - protein, 27 aa, Artificial Sequence
  synthetic construct; antibody fragment
EPKSCDKTHLCPPCPAPEFEGGPSVFL

SEQ ID NO: 210 - protein, 22 aa, Artificial Sequence
  synthetic construct; antibody fragment
EPKSCDKTHTCPPCPAPEAAGG

SEQ ID NO: 211 - protein, 22 aa, Artificial Sequence
  synthetic construct; antibody fragment
EPKSCDKTHLCPPCPAPEAAGG

SEQ ID NO: 212 - protein, 27 aa, Artificial Sequence
  synthetic construct; antibody fragment
EPKSCDKTHTCPPCPAPEAAGGPSVFL

SEQ ID NO: 213 - protein, 27 aa, Artificial Sequence
  synthetic construct; antibody fragment
EPKSCDKTHLCPPCPAPEAAGGPSVFL

SEQ ID NO: 214 - protein, 19 aa, Artificial Sequence
  synthetic construct; antibody fragment
ESKYGPPCPPCPAPEFLGG

SEQ ID NO: 215 - protein, 19 aa, Artificial Sequence
  synthetic construct; antibody fragment
ESKYGPPCPSCPAPEFLGG

SEQ ID NO: 216 - protein, 13 aa, Artificial Sequence
  synthetic construct; antibody fragment
ESKYGPPCPPCPA

SEQ ID NO: 217 - protein, 13 aa, Artificial Sequence
  synthetic construct; antibody fragment
ESKYGPPCPSCPA

SEQ ID NO: 218 - protein, 24 aa, Artificial Sequence
  synthetic construct; antibody fragment
ESKYGPPCPSCPAPEFLGGPSVFL

SEQ ID NO: 219 - protein, 24 aa, Artificial Sequence
  synthetic construct; antibody fragment
ESKYGPPCPPCPAPEFLGGPSVFL

SEQ ID NO: 220 - protein, 18 aa, Artificial Sequence
  synthetic construct; antibody fragment
ERKCCVECPPCPAPPVAG

SEQ ID NO: 221 - protein, 13 aa, Artificial Sequence
  synthetic construct; antibody fragment
ERKCCVECPPCPA

SEQ ID NO: 222 - protein, 4 aa, Artificial Sequence
  synthetic construct; linker
RKRR

SEQ ID NO: 223 - protein, 4 aa, Artificial Sequence
  synthetic construct; linker
RRRR

SEQ ID NO: 224 - protein, 4 aa, Artificial Sequence
  synthetic construct; linker
RRKR

SEQ ID NO: 225 - protein, 4 aa, Artificial Sequence
  synthetic construct; linker
RKKR

SEQ ID NO: 226 - skipped

SEQ ID NO: 227 - protein, 21 aa, Artificial Sequence
  synthetic construct; linker
  SITE (1)..(3): This region may be absent in its entirety
GSGEGRGSLLTCGDVEENPGP

SEQ ID NO: 228 - protein, 22 aa, Artificial Sequence
  synthetic construct; linker
  SITE (1)..(3): This region may be absent in its entirety
GSGATNFSLLKQAGDVEENPGP

SEQ ID NO: 229 - protein, 23 aa, Artificial Sequence
  synthetic construct; linker
  SITE (1)..(3): This region may be absent in its entirety
GSGQCTNYALLKLAGDVESNPGP

SEQ ID NO: 230 - protein, 27 aa, Artificial Sequence
  synthetic construct; linker
  SITE (1)..(3): This region may be absent in its entirety
GSGAPVKQTLNFDLLKLAGDVESNPGP

SEQ ID NO: 231 - protein, 28 aa, Artificial Sequence
  synthetic construct; linker
RKRRAPVKQTLNFDLLKLAGDVESNPGP

SEQ ID NO: 232 - protein, 6 aa, Artificial Sequence
  synthetic construct; antibody fragment
CPPCPA

SEQ ID NO: 233 - protein, 5 aa, Artificial Sequence
  synthetic construct; antibody fragment
CPPCP

SEQ ID NO: 234-235 - skipped (2 entries)

SEQ ID NO: 236 - protein, 7 aa, Artificial Sequence
  synthetic construct; antibody fragment
EDTAVYY

SEQ ID NO: 237 - protein, 8 aa, Artificial Sequence
  synthetic construct; antibody fragment
YCASGDYW

SEQ ID NO: 238 - protein, 7 aa, Artificial Sequence
  synthetic construct; antibody fragment
EDVGVYY

SEQ ID NO: 239 - protein, 7 aa, Artificial Sequence
  synthetic construct; antibody fragment
EDFAVYY

SEQ ID NO: 240 - protein, 7 aa, Artificial Sequence
  synthetic construct; antibody fragment
EDSGIYY

SEQ ID NO: 241 - protein, 6 aa, Artificial Sequence
  synthetic construct; antibody fragment
NWEDYW

SEQ ID NO: 242 - protein, 7 aa, Artificial Sequence
  synthetic construct; antibody fragment
EDFATYY

SEQ ID NO: 243 - protein, 6 aa, Artificial Sequence
  synthetic construct; antibody fragment
DTAVYY

SEQ ID NO: 244 - protein, 6 aa, Artificial Sequence
  synthetic construct; antibody fragment
YYGAFD

SEQ ID NO: 245 - protein, 7 aa, Artificial Sequence
  synthetic construct; antibody fragment
EDEADYY

SEQ ID NO: 246 - protein, 8 aa, Artificial Sequence
  synthetic construct; antibody fragment
YYYGRHFD

SEQ ID NO: 247 - protein, 11 aa, Artificial Sequence
  synthetic construct; antibody fragment
SQSVDYDGDSY

SEQ ID NO: 248 - protein, 7 aa, Artificial Sequence
  synthetic construct; antibody fragment
EDVAVYY

SEQ ID NO: 249 - protein, 7 aa, Artificial Sequence
  synthetic construct; antibody fragment
EDLATYY

SEQ ID NO: 250 - protein, 6 aa, Artificial Sequence
  synthetic construct; antibody fragment
EDTAVY

SEQ ID NO: 251 - protein, 7 aa, Artificial Sequence
  synthetic construct; antibody fragment
DDFATYY

SEQ ID NO: 252 - protein, 6 aa, Artificial Sequence
  synthetic construct; antibody fragment
DLSGYY

SEQ ID NO: 253 - protein, 7 aa, Artificial Sequence
  synthetic construct; antibody fragment
EDVATYY

SEQ ID NO: 254 - protein, 6 aa, Artificial Sequence
  synthetic construct; antibody fragment
DTAMYY

SEQ ID NO: 255 - protein, 6 aa, Artificial Sequence
  synthetic construct; antibody fragment
DEADYY

SEQ ID NO: 256 - protein, 8 aa, Artificial Sequence
  synthetic construct; antibody fragment
TFEGDYVF

SEQ ID NO: 257 - protein, 9 aa, Artificial Sequence
  synthetic construct; antibody fragment
DNLGTYYVE

SEQ ID NO: 258 - skipped

SEQ ID NO: 259 - protein, 6 aa, Artificial Sequence
  synthetic construct; antibody fragment
DSIPNY

SEQ ID NO: 260 - protein, 6 aa, Artificial Sequence
  synthetic construct; antibody fragment
YCQSFD

SEQ ID NO: 261 - protein, 7 aa, Artificial Sequence
  synthetic construct; antibody fragment
EDTGIYY

SEQ ID NO: 262 - protein, 7 aa, Artificial Sequence
  synthetic construct; antibody fragment
EDAATYY

SEQ ID NO: 263 - protein, 6 aa, Artificial Sequence
  synthetic construct; antibody fragment
YNEKFE

SEQ ID NO: 264 - protein, 7 aa, Artificial Sequence
  synthetic construct; antibody fragment
EDFAMYY

SEQ ID NO: 265 - protein, 7 aa, Artificial Sequence
  synthetic construct; antibody fragment
FTFDDYA

SEQ ID NO: 266 - protein, 7 aa, Artificial Sequence
  synthetic construct; antibody fragment
EDTGVYY

SEQ ID NO: 267 - protein, 7 aa, Artificial Sequence
  synthetic construct; antibody fragment
EDIADYY

SEQ ID NO: 268 - protein, 6 aa, Artificial Sequence
  synthetic construct; antibody fragment
YYYGMD

SEQ ID NO: 269 - protein, 6 aa, Artificial Sequence
  synthetic construct; antibody fragment
ELLIYY

SEQ ID NO: 270 - protein, 7 aa, Artificial Sequence
  synthetic construct; antibody fragment
EDTALYY

SEQ ID NO: 271 - protein, 7 aa, Artificial Sequence
  synthetic construct; antibody fragment
EDFASYY

SEQ ID NO: 272 - protein, 6 aa, Artificial Sequence
  synthetic construct; antibody fragment
DLLHWY

SEQ ID NO: 273 - protein, 7 aa, Artificial Sequence
  synthetic construct; antibody fragment
DDTAVYY

SEQ ID NO: 274 - protein, 736 aa, Adeno-associated virus 1
MAADGYLPDWLEDNLSEGIREWWDLKPGAPKPKANQQKQDDGRGLVLPGYKYLGPFNGLDKGEPVNAADAAALEHDKAYDQQLKAGDNPYLRYNHADAEFQERLQEDTSFGGNLGRAVFQAKKRVLEPLGLVEEGAKTAPGKKRPVEQSPQEPDSSSGIGKTGQQPAKKRLNFGQTGDSESVPDPQPLGEPPATPAAVGPTTMASGGGAPMADNNEGADGVGNASGNWHCDSTWLGDRVITTSTRTWALPTYNNHLYKQISSASTGASNDNHYFGYSTPWGYFDFNRFHCHFSPRDWQRLINNNWGFRPKRLNFKLFNIQVKEVTTNDGVTTIANNLTSTVQVFSDSEYQLPYVLGSAHQGCLPPFPADVFMIPQYGYLTLNNGSQAVGRSSFYCLEYFPSQMLRTGNNFTFSYTFEEVPFHSSYAHSQSLDRLMNPLIDQYLYYLNRTQNQSGSAQNKDLLFSRGSPAGMSVQPKNWLPGPCYRQQRVSKTKTDNNNSNFTWTGASKYNLNGRESIINPGTAMASHKDDEDKFFPMSGVMIFGKESAGASNTALDNVMITDEEEIKATNPVATERFGTVAVNFQSSSTDPATGDVHAMGALPGMVWQDRDVYLQGPIWAKIPHTDGHFHPSPLMGGFGLKNPPPQILIKNTPVPANPPAEFSATKFASFITQYSTGQVSVEIEWELQKENSKRWNPEVQYTSNYAKSANVDFTVDNNGLYTEPRPIGTRYLTRPL

SEQ ID NO: 275 - protein, 735 aa, Adeno-associated virus 2 [sequence omitted]

SEQ ID NO: 276 - protein, 736 aa, Adeno-associated virus 3
MAADGYLPDWLEDNLSEGIREWWALKPGVPQPKANQQHQDNRRGLVLPGYKYLGPGNGLDKGEPVNEADAAALEHDKAYDQQLKAGDNPYLKYNHADAEFQERLQEDTSFGGNLGRAVFQAKKRILEPLGLVEEAAKTAPGKKGAVDQSPQEPDSSSGVGKSGKQPARKRLNFGQTGDSESVPDPQPLGEPPAAPTSLGSNTMASGGGAPMADNNEGADGVGNSSGNWHCDSQWLGDRVITTSTRTWALPTYNNHLYKQISSQSGASNDNHYFGYSTPWGYFDFNRFHCHFSPRDWQRLINNNWGFRPKKLSFKLFNIQVRGVTQNDGTTTIANNLTSTVQVFTDSEYQLPYVLGSAHQGCLPPFPADVFMVPQYGYLTLNNGSQAVGRSSFYCLEYFPSQMLRTGNNFQFSYTFEDVPFHSSYAHSQSLDRLMNPLIDQYLYYLNRTQGTTSGTTNQSRLLFSQAGPQSMSLQARNWLPGPCYRQQRLSKTANDNNNSNFPWTAASKYHLNGRDSLVNPGPAMASHKDDEEKFFPMHGNLIFGKEGTTASNAELDNVMITDEEEIRTTNPVATEQYGTVANNLQSSNTAPTTGTVNHQGALPGMVWQDRDVYLQGPIWAKIPHTDGHFHPSPLMGGFGLKHPPPQIMIKNTPVPANPPTTFSPAKFASFITQYSTGQVSVEIEWELQKENSKRWNPEIQYTSNYNKSVNVDFTVDTNGVYSEPRPIGTRYLTRNL

SEQ ID NO: 277 - protein, 734 aa, Adeno-associated virus 4
MTDGYLPDWLEDNLSEGVREWWALQPGAPKPKANQQHQDNARGLVLPGYKYLGPGNGLDKGEPVNAADAAALEHDKAYDQQLKAGDNPYLKYNHADAEFQQRLQGDTSFGGNLGRAVFQAKKRVLEPLGLVEQAGETAPGKKRPLIESPQQPDSSTGIGKKGKQPAKKKLVFEDETGAGDGPPEGSTSGAMSDDSEMRAAAGGAAVEGGQGADGVGNASGDWHCDSTWSEGHVTTTSTRTWVLPTYNNHLYKRLGESLQSNTYNGFSTPWGYFDFNRFHCHFSPRDWQRLINNNWGMRPKAMRVKIFNIQVKEVTTSNGETTVANNLTSTVQIFADSSYELPYVMDAGQEGSLPPFPNDVFMVPQYGYCGLVTGNTSQQQTDRNAFYCLEYFPSQMLRTGNNFEITYSFEKVPFHSMYAHSQSLDRLMNPLIDQYLWGLQSTTTGTTLNAGTATTNFTKLRPTNFSNFKKNWLPGPSIKQQGFSKTANQNYKIPATGSDSLIKYETHSTLDGRWSALTPGPPMATAGPADSKFSNSQLIFAGPKQNGNTATVPGTLIFTSEEELAATNATDTDMWGNLPGGDQSNSNLPTVDRLTALGAVPGMVWQNRDIYYQGPIWAKIPHTDGHFHPSPLIGGFGLKHPPPQIFIKNTPVPANPATTFSSTPVNSFITQYSTGQVSVQIDWEIQKERSKRWNPEVQFTSNYGQQNSLLWAPDAAGKYTEPRAIGTRYLTHHL

SEQ ID NO: 278 - protein, 724 aa, Adeno-associated virus 5
MSFVDHPPDWLEEVGEGLREFLGLEAGPPKPKPNQQHQDQARGLVLPGYNYLGPGNGLDRGEPVNRADEVAREHDISYNEQLEAGDNPYLKYNHADAEFQEKLADDTSFGGNLGKAVFQAKKRVLEPFGLVEEGAKTAPTGKRIDDHFPKRKKARTEEDSKPSTSSDAEAGPSGSQQLQIPAQPASSLGADTMSAGGGGPLGDNNQGADGVGNASGDWHCDSTWMGDRVVTKSTRTWVLPSYNNHQYREIKSGSVDGSNANAYFGYSTPWGYFDFNRFHSHWSPRDWQRLINNYWGFRPRSLRVKIFNIQVKEVTVQDSTTTIANNLTSTVQVFTDDDYQLPYVVGNGTEGCLPAFPPQVFTLPQYGYATLNRDNTENPTERSSFFCLEYFPSKMLRTGNNFEFTYNFEEVPFHSSFAPSQNLFKLANPLVDQYLYRFVSTNNTGGVQFNKNLAGRYANTYKNWFPGPMGRTQGWNLGSGVNRASVSAFATTNRMELEGASYQVPPQPNGMTNNLQGSNTYALENTMIFNSQPANPGTTATYLEGNMLITSESETQPVNRVAYNVGGQMATNNQSSTTAPATGTYNLQEIVPGSVWMERDVYLQGPIWAKIPETGAHFHPSPAMGGFGLKHPPPMMLIKNTPVPGNITSFSDVPVSSFITQYSTGQVTVEMEWELKKENSKRWNPEIQYTNNYNDPQFVDFAPDSTGEYRTTRPIGTRYLTRPL

SEQ ID NO: 279 - protein, 736 aa, Adeno-associated virus 6
MAADGYLPDWLEDNLSEGIREWWDLKPGAPKPKANQQKQDDGRGLVLPGYKYLGPFNGLDKGEPVNAADAAALEHDKAYDQQLKAGDNPYLRYNHADAEFQERLQEDTSFGGNLGRAVFQAKKRVLEPFGLVEEGAKTAPGKKRPVEQSPQEPDSSSGIGKTGQQPAKKRLNFGQTGDSESVPDPQPLGEPPATPAAVGPTTMASGGGAPMADNNEGADGVGNASGNWHCDSTWLGDRVITTSTRTWALPTYNNHLYKQISSASTGASNDNHYFGYSTPWGYFDFNRFHCHFSPRDWQRLINNNWGFRPKRLNFKLFNIQVKEVTTNDGVTTIANNLTSTVQVFSDSEYQLPYVLGSAHQGCLPPFPADVFMIPQYGYLTLNNGSQAVGRSSFYCLEYFPSQMLRTGNNFTFSYTFEDVPFHSSYAHSQSLDRLMNPLIDQYLYYLNRTQNQSGSAQNKDLLFSRGSPAGMSVQPKNWLPGPCYRQQRVSKTKTDNNNSNFTWTGASKYNLNGRESIINPGTAMASHKDDKDKFFPMSGVMIFGKESAGASNTALDNVMITDEEEIKATNPVATERFGTVAVNLQSSSTDPATGDVHVMGALPGMVWQDRDVYLQGPIWAKIPHTDGHFHPSPLMGGFGLKHPPPQILIKNTPVPANPPAEFSATKFASFITQYSTGQVSVEIEWELQKENSKRWNPEVQYTSNYAKSANVDFTVDNNGLYTEPRPIGTRYLTRPL

SEQ ID NO: 280 - protein, 737 aa, Adeno-associated virus 7
MAADGYLPDWLEDNLSEGIREWWDLKPGAPKPKANQQKQDNGRGLVLPGYKYLGPFNGLDKGEPVNAADAAALEHDKAYDQQLKAGDNPYLRYNHADAEFQERLQEDTSFGGNLGRAVFQAKKRVLEPLGLVEEGAKTAPAKKRPVEPSPQRSPDSSTGIGKKGQQPARKRLNFGQTGDSESVPDPQPLGEPPAAPSSVGSGTVAAGGGAPMADNNEGADGVGNASGNWHCDSTWLGDRVITTSTRTWALPTYNNHLYKQISSETAGSTNDNTYFGYSTPWGYFDFNRFHCHFSPRDWQRLINNNWGFRPKKLRFKLFNIQVKEVTTNDGVTTIANNLTSTIQVFSDSEYQLPYVLGSAHQGCLPPFPADVFMIPQYGYLTLNNGSQSVGRSSFYCLEYFPSQMLRTGNNFEFSYSFEDVPFHSSYAHSQSLDRLMNPLIDQYLYYLARTQSNPGGTAGNRELQFYQGGPSTMAEQAKNWLPGPCFRQQRVSKTLDQNNNSNFAWTGATKYHLNGRNSLVNPGVAMATHKDDEDRFFPSSGVLIFGKTGATNKTTLENVLMTNEEEIRPTNPVATEEYGIVSSNLQAANTAAQTQVVNNQGALPGMVWQNRDVYLQGPIWAKIPHTDGNFHPSPLMGGFGLKHPPPQILIKNTPVPANPPEVFTPAKFASFITQYSTGQVSVEIEWELQKENSKRWNPEIQYTSNFEKQTGVDFAVDSQGVYSEPRPIGTRYLTRNL

SEQ ID NO: 281 - protein, 736 aa, Adeno-associated virus
MAADGYLPDWLEDTLSEGIRQWWKLKPGPPPPKPAERHKDDSRGLVLPGYKYLGPGNGLDKGEPVNAADAAALEHDKAYDQQLKAGDNPYLKYNHADAEFQERLKEDTSFGGNLGRAVFQAKKRLLEPLGLVEEAAKTAPGKKRPVEQSPQEPDSSAGIGKSGSQPAKKKLNFGQTGDTESVPDPQPIGEPPAAPSGVGSLTMASGGGAPVADNNEGADGVGSSSGNWHCDSQWLGDRVITTSTRTWALPTYNNHLYKQISNSTSGGSSNDNAYFGYSTPWGYFDFNRFHCHFSPRDWQRLINNNWGFRPKRLNFKLFNIQVKEVTDNNGVKTIANNLTSTVQVFTDSDYQLPYVLGSAHEGCLPPFPADVFMIPQYGYLTLNDGGQAVGRSSFYCLEYFPSQMLRTGNNFQFSYEFENVPFHSSYAHSQSLDRLMNPLIDQYLYYLSKTINGSGQNQQTLKFSVAGPSNMAVQGRNYIPGPSYRQQRVSTTVTQNNNSEFAWPGASSWALNGRNSLMNPGPAMASHKEGEDRFFPLSGSLIFGKQGTGRDNVDADKVMITNEEEIKTTNPVATESYGQVATNHQSAQAQAQTGWVQNQGILPGMVWQDRDVYLQGPIWAKIPHTDGNFHPSPLMGGFGMKHPPPQILIKNTPVPADPPTAFNKDKLNSFITQYSTGQVSVEIEWELQKENSKRWNPEIQYTSNYYKSNNVEFAVSTEGVYSEPRPIGTRYLTRNL

SEQ ID NO: 282 - protein, 736 aa, Adeno-associated virus
MAADGYLPDWLEDTLSEGIRQWWKLKPGPPPPKPAERHKDDSRGLVLPGYKYLGPGNGLDKGEPVNAADAAALEHDKAYDQQLKAGDNPYLKYNHADAEFQERLKEDTSFGGNLGRAVFQAKKRLLEPLGLVEEAAKTAPGKKRPVEQSPQEPDSSAGIGKSGSQPAKKKLNFGQTGDTESVPDPQPIGEPPAAPSGVGSLTMASGGGAPVADNNEGADGVGSSSGNWHCDSQWLGDRVITTSTRTWALPTYNNHLYKQISNSTSGGSSNDNAYFGYSTPWGYFDFNRFHCHFSPRDWQRLINNNWGFRPKRLNFKLFNIQVKEVTDNNGVKTIANNLTSTVQVFTDSDYQLPYVLGSAHEGCLPPFPADVFMIPQYGYLTLNDGSQAVGRSSFYCLEYFPSQMLRTGNNFQFSYEFENVPFHSSYAHSQSLDRLMNPLIDQYLYYLSKTINGSGQNQQTLKFSVAGPSNMAVQGRNYIPGPSYRQQRVSTTVTQNNNSEFAWPGASSWALNGRNSLMNPGPAMASHKEGEDRFFPLSGSLIFGKQGTGRDNVDADKVMITNEEEIKTTNPVATESYGQVATNHQSAQAQAQTGWVQNQGILPGMVWQDRDVYLQGPIWAKIPHTDGNFHPSPLMGGFGMKHPPPQILIKNTPVPADPPTAFNKDKLNSFITQYSTGQVSVEIEWELQKENSKRWNPEIQYTSNYYKSNNVEFAVNTEGVYSEPRPIGTRYLTRNL

SEQ ID NO: 283 - protein, 232 aa, Artificial Sequence
  synthetic construct; antibody fragment
EPKSCDKTHTCPPCPAPELLGGPSVFLFPPKPKDTLMISRTPEVTCVVVDVSHEDPEVKFNWYVDGVEVHNAKTKPREEQYNSTYRVVSVLTVLHQDWLNGKEYKCKVSNKALPAPIEKTISKAKGQPREPQVYTLPPSRDELTKNQVSLTCLVKGFYPSDIAVEWESNGQPENNYKTTPPVLDSDGSFFLYSKLTVDKSRWQQGNVFSCSVMHEALHNHYTQKSLSLSPGK

SEQ ID NO: 284 - protein, 228 aa, Artificial Sequence
  synthetic construct; antibody fragment
ERKCCVECPPCPAPPVAGPSVFLFPPKPKDTLMISRTPEVTCVVVDVSHEDPEVQFNWYVDGVEVHNAKTKPREEQFNSTFRVVSVLTVVHQDWLNGKEYKCKVSNKGLPAPIEKTISKTKGQPREPQVYTLPPSREEMTKNQVSLTCLVKGFYPSDISVEWESNGQPENNYKTTPPMLDSDGSFFLYSKLTVDKSRWQQGNVFSCSVMHEALHNHYTQKSLSLSPGK

SEQ ID NO: 285 - protein, 229 aa, Artificial Sequence
  synthetic construct; antibody fragment
ESKYGPPCPSCPAPEFLGGPSVFLFPPKPKDTLMISRTPEVTCVVVDVSQEDPEVQFNWYVDGVEVHNAKTKPREEQFNSTYRVVSVLTVLHQDWLNGKEYKCKVSNKGLPSSIEKTISKAKGQPREPQVYTLPPSQEEMTKNQVSLTCLVKGFYPSDIAVEWESNGQPENNYKTTPPVLDSDGSFFLYSRLTVDKSRWQEGNVFSCSVMHEALHNHYTQKSLSLSLGK

SEQ ID NO: 286 - DNA, 2193 bp, Artificial Sequence
  synthetic construct; antibody fragment
atgtacagaatgcagctgctgctgctcattgccctgtctctggccctggtcaccaattctgaggtccagctgcttgagagtggtggtggactggttcagcctggtggcagcctgagactgtcttgtgctgcctctggcttcaccttcagccactatatcatgatgtgggtcagacaggcccctggcaaaggcctggaatgggtgtcaggcatctacagcagtggtggcatcacagtgtatgctgactctgtgaagggcagattcaccatcagcagagacaacagcaagaacaccctgtacctgcagatgaactccctgagagctgaggacacagcagtgtactactgtgcctatagaagaattggggtgcccagaagggatgagtttgacatctggggccagggcaccatggttacagtgtcctctgccagcacaaagggcccctctgtttttccactggctcccagcagcaagagcaccagtggtggaacagctgccctgggctgtctggtcaaggattacttccctgagcctgtgactgtgtcctggaactctggggctctgacttctggggtgcacacctttccagctgtgctgcagtcctctggcctgtactctctgtcctctgtggtcacagtgcctagctctagcctgggcacacagacctacatctgcaatgtgaaccacaagcctagcaacaccaaggtggacaagagagtggaacccaagagctgtgacaagacccacacctgtcctccatgtcctgctccagaactgcttggaggcccttctgtgttcctgtttcctccaaagcctaaggacaccctgatgatcagcagaacccctgaagtgacctgtgtggtggttgatgtgtcccatgaggacccagaagtgaagttcaattggtatgtggatggggttgaagtgcacaatgccaagaccaagcctagagaggaacagtacaacagcacctacagagtggtttctgtgctgacagtgctgcaccaggactggctgaatggcaaagagtacaagtgcaaggtgtccaacaaggccctgcctgctcctattgagaaaaccatctccaaggccaagggccagccaagagaaccccaggtttacaccctgccacctagcagagaagagatgaccaagaaccaggtgtccctgacctgcctggttaagggcttctacccctctgacattgctgtggaatgggagagcaatggccagcctgaaaacaactacaagacaacccctcctgtgctggactctgatggctcattcttcctgtacagcaagctgactgtggacaagtccagatggcagcagggaaatgtgttcagctgctctgtgatgcatgaggccctgcacaaccactacacccagaaaagtctgtctctgtcccctggcagaaagagaagaggctctggagaaggcagaggctccctgctgacatgtggggatgttgaagagaatcctgggcctatgtataggatgcaactgctcctcctgattgctctgagcctggctcttgtgaccaactctgacatccagatgacacagagcccctccacactgtctgcatctgtgggagacagagtgaccatcacctgtagagccagccagtctatctctagctggctggcctggtatcagcaaaagcctggcaaggcccctaagctgctgatctacaaggccagcacacttgagtcaggggtgccctccagattttctggctctggatctggcacagagttcaccctgaccatcagctccctgcagccagatgactttgccacctactactgccagcagtacaatacctactggacctttggccagggaacaaaggtggaaatcaagagaacagtggctgccccatctgtgttcatcttcccaccatctgatgaacagctgaagtctggcactgcctctgttgtgtgcctgctgaacaacttttaccccagagaagccaaggtgcagtggaaagtggataatgccctgcagtctggcaatagccaagaatctgtgacagagcaggactccaaggattccacctacagcctgagcagcaccctgacactgagcaaggctgactatgagaagcacaaagtgtatgcctgtgaagtgacacaccagggactgagcagcccagtgaccaagagcttcaacaggggagagtgctgataa

SEQ ID NO: 287 - DNA, 2211 bp, Artificial Sequence
  synthetic construct; antibody fragment
atgtacagaatgcagctgctgctgctcattgccctgtctctggccctggtcaccaattctgaggtccagctgcttgagagtggtggtggactggttcagcctggtggcagcctgagactgtcttgtgctgcctctggcttcaccttcagccactatatcatgatgtgggtcagacaggcccctggcaaaggcctggaatgggtgtcaggcatctacagcagtggtggcatcacagtgtatgctgactctgtgaagggcagattcaccatcagcagagacaacagcaagaacaccctgtacctgcagatgaactccctgagagctgaggacacagcagtgtactactgtgcctatagaagaattggggtgcccagaagggatgagtttgacatctggggccagggcaccatggttacagtgtcctctgccagcacaaagggcccctctgtttttccactggctcccagcagcaagagcaccagtggtggaacagctgccctgggctgtctggtcaaggattacttccctgagcctgtgactgtgtcctggaactctggggctctgacctctggggtgcacacctttccagctgtgctgcagtcctctggcctgtactctctgtcctctgtggtcacagtgcctagctctagcctgggcacacagacctacatctgcaatgtgaaccacaagcctagcaacaccaaggtggacaagagagtggaacccaagagctgtgacaagacccacacctgtcctccatgtcctgctccagaactgcttggaggcccttctgtgttcctgtttcctccaaagcctaaggacaccctgatgatcagcagaacccctgaagtgacctgtgtggtggttgatgtgtcccatgaggacccagaagtgaagttcaattggtatgtggatggggttgaagtgcacaatgccaagaccaagcctagagaggaacagtacaacagcacctacagagtggtttctgtgctgacagtgctgcaccaggactggctgaatggcaaagagtacaagtgcaaggtgtccaacaaggccctgcctgctcctattgagaaaaccatctccaaggccaagggccagccaagagaaccccaggtttacaccctgccacctagcagagaagagatgaccaagaaccaggtgtccctgacctgcctggttaagggcttctacccctctgacattgctgtggaatgggagagcaatggccagcctgaaaacaactacaagacaacccctcctgtgctggactctgatggctcattcttcctgtacagcaagctgactgtggacaagtccagatggcagcagggaaatgtgttcagctgctctgtgatgcatgaggccctgcacaaccactacacccagaaaagtctgtctctgtcccctggcagaaagagaagaggatcaggggccccagtgaagcagaccctgaactttgatctgctgaagctggctggggatgttgagagcaaccctggacctatgtataggatgcaactgctcctcctgattgctctgagcctggctcttgtgaccaactctgacatccagatgacacagagcccctccacactgtctgcatctgtgggagacagagtgaccatcacctgtagagccagccagtctatctcttcctggctggcctggtatcagcaaaagcctggcaaggcccctaagctgctgatctacaaggccagcacacttgagtcaggggtgccctccagattttctggctctggatctggcacagagttcaccctgaccatcagctccctgcagccagatgactttgccacctactactgccagcagtacaatacctactggacctttggccagggaacaaaggtggaaatcaagagaacagtggctgccccatctgtgttcatcttcccaccatctgatgaacagctgaagtctggcactgcctctgttgtgtgcctgctgaacaacttttaccctagagaagccaaggtgcagtggaaagtggataatgccctgcagtctggcaatagccaagaatctgtgacagagcaggactccaaggattccacctacagcctgagcagcaccctgacactgagcaaggctgactatgagaagcacaaagtgtatgcctgtgaagtgacacaccagggactgagcagcccagtgaccaagagcttcaacaggggagagtgctgataa

SEQ ID NO: 288 - protein, 7 aa, Artificial Sequence
  synthetic construct; capsid sequence
LGETTRP

SEQ ID NO: 289 - protein, 9 aa, Artificial Sequence
  synthetic construct; capsid sequence
LALGETTRP

SEQ ID NO: 290 - protein, 205 aa, Artificial Sequence
  synthetic construct; antibody fragment
FPPKPKDTLMISRTPEVTCVVVDVSHEDPEVKFNWYVDGVEVHNAKTKPREEQYNSTYRVVSVLTVLHQDWLNGKEYKCKVSNKALPAPIEKTISKAKGQPREPQVYTLPPSRDELTKNQVSLTCLVKGFYPSDIAVEWESNGQPENNYKTTPPVLDSDGSFFLYSKLTVDKSRWQQGNVFSCSVMHEALHNHYTQKSLSLSPGK

SEQ ID NO: 291 - protein, 205 aa, Artificial Sequence; identical to SEQ ID NO: 290
  synthetic construct; antibody fragment

SEQ ID NO: 292 - protein, 205 aa, Artificial Sequence
  synthetic construct; antibody fragment
FPPKPKDTLMISRTPEVTCVVVDVSQEDPEVQFNWYVDGVEVHNAKTKPREEQFNSTYRVVSVLTVLHQDWLNGKEYKCKVSNKGLPSSIEKTISKAKGQPREPQVYTLPPSQEEMTKNQVSLTCLVKGFYPSDIAVEWESNGQPENNYKTTPPVLDSDGSFFLYSRLTVDKSRWQEGNVFSCSVMHEALHNHYTQKSLSLSLGK

SEQ ID NO: 293 - protein, 205 aa, Artificial Sequence
  synthetic construct; antibody fragment
FPPKPKDTLMISRTPEVTCVVVDVSHEDPEVKFNWYVDGVEVHNAKTKPREEQYNSTYRVVSVLTVLHQDWLNGKEYKCKVSNKALPAPIEKTISKAKGQPREPQVYTLPPSREEMTKNQVSLTCLVKGFYPSDIAVEWESNGQPENNYKTTPPVLDSDGSFFLYSKLTVDKSRWQQGNVFSCSVMHEALHNHYTQKSLSLSPGK

SEQ ID NO: 294 - protein, 205 aa, Artificial Sequence
  synthetic construct; antibody fragment
FPPKPKDTLMISRTPEVTCVVVDVSHEDPEVKFNWYVDGVEVHNAKTKPREEQYNSTYRVVSVLTVLHQDWLNGKEYKCKVSNKALPASIEKTISKAKGQPREPQVYTLPPSREEMTKNQVSLTCLVKGFYPSDIAVEWESNGQPENNYKTTPPVLDSDGSFFLYSKLTVDKSRWQQGNVFSCSVMHEALHNHYTQKSLSLSPGK

SEQ ID NO: 295 - protein, 205 aa, Artificial Sequence; identical to SEQ ID NO: 293
  synthetic construct; antibody fragment

SEQ ID NO: 296 - protein, 205 aa, Artificial Sequence
  synthetic construct; antibody fragment
FPPKPKDTLMISRTPEVTCVVVDVSHEDPEVKFNWYVDGVEVHNAKTKPREEQYASTYRVVSVLTVLHQDWLNGKEYKCKVSNKALPAPIEKTISKAKGQPREPQVYTLPPSREEMTKNQVSLTCLVKGFYPSDIAVEWESNGQPENNYKTTPPVLDSDGSFFLYSKLTVDKSRWQQGNVFSCSVMHEALHNHYTQKSLSLSPGK

SEQ ID NO: 297 - protein, 205 aa, Artificial Sequence
  synthetic construct; antibody fragment
FPPKPKDTLMISRTPEVTCVVVDVSHEDPEVQFNWYVDGVEVHNAKTKPREEQFNSTFRVVSVLTVVHQDWLNGKEYKCKVSNKGLPSSIEKTISKTKGQPREPQVYTLPPSREEMTKNQVSLTCLVKGFYPSDIAVEWESNGQPENNYKTTPPMLDSDGSFFLYSKLTVDKSRWQQGNVFSCSVMHEALHNHYTQKSLSLSPGK

SEQ ID NO: 298 - protein, 205 aa, Artificial Sequence; identical to SEQ ID NO: 292
  synthetic construct; antibody fragment

SEQ ID NO: 299 - protein, 205 aa, Artificial Sequence; identical to SEQ ID NO: 290
  synthetic construct; antibody fragment

SEQ ID NO: 300 - protein, 210 aa, Artificial Sequence
  synthetic construct; antibody fragment
PSVFLFPPKPKDTLMISRTPEVTCVVVDVSHEDPEVQFNWYVDGVEVHNAKTKPREEQFNSTFRVVSVLTVVHQDWLNGKEYKCKVSNKGLPAPIEKTISKTKGQPREPQVYTLPPSREEMTKNQVSLTCLVKGFYPSDIAVEWESNGQPENNYKTTPPMLDSDGSFFLYSKLTVDKSRWQQGNVFSCSVMHEALHNHYTQKSLSLSPGK

SEQ ID NO: 301 - protein, 205 aa, Artificial Sequence; identical to SEQ ID NO: 293
  synthetic construct; antibody fragment

SEQ ID NO: 302 - protein, 205 aa, Artificial Sequence; identical to SEQ ID NO: 290
  synthetic construct; antibody fragment

SEQ ID NO: 303 - protein, 205 aa, Artificial Sequence; identical to SEQ ID NO: 290
  synthetic construct; antibody fragment

SEQ ID NO: 304 - protein, 205 aa, Artificial Sequence; identical to SEQ ID NO: 290
  synthetic construct; antibody fragment

SEQ ID NO: 305 - protein, 205 aa, Artificial Sequence; identical to SEQ ID NO: 290
  synthetic construct; antibody fragment

SEQ ID NO: 306 - protein, 205 aa, Artificial Sequence
  synthetic construct; antibody fragment
FPPKPKDQLMISRTPEVTCVVVDVSHEDPEVKFNWYVDGVEVHNAKTKPREEQYNSTYRVVSVLTVLHQDWLNGKEYKCKVSNKALPAPIEKTISKAKGQPREPQVYTLPPSREEMTKNQVSLTCLVKGFYPSDIAVEWESNGQPENNYKTTPPVLDSDGSFFLYSKLTVDKSRWQQGNVFSCSVLHEALHNHYTQKSLSLSPGK

SEQ ID NO: 307 - protein, 205 aa, Artificial Sequence; identical to SEQ ID NO: 293
  synthetic construct; antibody fragment

SEQ ID NO: 308 - protein, 205 aa, Artificial Sequence; identical to SEQ ID NO: 293
  synthetic construct; antibody fragment

SEQ ID NO: 309 - protein, 208 aa, Artificial Sequence
  synthetic construct; antibody fragment
PSVFLFPPKPKDTLMISRTPEVTCVVVDVSQEDPEVQFNWYVDGVEVHNAKTKPREEQFNSTFRVVSVLTVVHQDWLNGKEYKCKVSNKGLPAPIEKTISKTKGQPREPQVYTLPPSQEEMTKNQVSLTCLVKGFYPSDIAVEWESNGQPENNYKTTPPMLDSDGSFFLYSKLTVDKSRWQEGNVFSCSVMHEALHAHYTQKSLSLSP

SEQ ID NO: 310 - protein, 205 aa, Artificial Sequence; identical to SEQ ID NO: 290
  synthetic construct; antibody fragment

SEQ ID NO: 311 - protein, 205 aa, Artificial Sequence; identical to SEQ ID NO: 293
  synthetic construct; antibody fragment

SEQ ID NO: 312 - protein, 204 aa, Artificial Sequence
  synthetic construct; antibody fragment
FPPKPKDTLMISRTPEVTCVVVDVSHEDPEVKFNWYVDGVEVHNAKTKPREEQYNSTYRVVSVLTVLHQDWLNGKEYKCKVSNKALPAPIEKTISKAKGQPREPQVYTLPPSREEMTKNQVSLTCLVKGFYPSDIAVEWESNGQPENNYKTTPPVLDSDGSFFLYSKLTVDKSRWQQGNVFSCSVMHEALHNHYTQKSLSLSPG

SEQ ID NO: 313 - protein, 210 aa, Artificial Sequence; identical to SEQ ID NO: 300
  synthetic construct; antibody fragment

SEQ ID NO: 314 - protein, 204 aa, Artificial Sequence; identical to SEQ ID NO: 312
  synthetic construct; antibody fragment

SEQ ID NO: 315 - DNA, 969 bp, Artificial Sequence
  synthetic construct; promoter sequence
aggttaatttttaaaaagcagtcaaaagtccaagtggcccttggcagcatttactctctctgtttgctctggttaataatctcaggagcacaaacattccagatccaggttaatttttaaaaagcagtcaaaagtccaagtggcccttggcagcatttactctctctgtttgctctggttaataatctcaggagcacaaacattccagatccggcgcgccagggctggaagctacctttgtctagaaggctcagaggcacacaggagtttctgggctcaccctgcccccttccaacccctcagttcccatcctccagcagctgtttgtgtgctgcctctgaagtccacactgaacaaacttcagcctactcatgtccctaaaatgggcaaacattgcaagcagcaaacagcaaacacacagccctccctgcctgctgaccttggagctggggcagaggtcagagacctctctgggcccatgccacctccaacatccactcgaccccttggaatttcggtggagaggagcagaggttgtcctggcgtggtttaggtagtgtgagaggggtacccggggatcttgctaccagtggaacagccactaaggattctgcagtgagagcagagggccagctaagtggtactctcccagagactgtctgactcacgccaccccctccaccttggacacaggacgctgtggtttctgagccaggtacaatgactcctttcggtaagtgcagtggaagctgtacactgcccaggcaaagcgtccgggcagcgtaggcgggcgactcagatcccagccagtggacttagcccctgtttgctcctccgataactggggtgaccttggttaatattcaccagcagcctcccccgttgcccctctggatccactgcttaaatacggacgaggacagggccctgtctcctcagcttcaggcaccaccactgacctgggacagt

SEQ ID NO: 316 - DNA, 1050 bp, Artificial Sequence
  synthetic construct; promoter sequence
aggctcagaggcacacaggagtttctgggctcaccctgcccccttccaacccctcagttcccatcctccagcagctgtttgtgtgctgcctctgaagtccacactgaacaaacttcagcctactcatgtccctaaaatgggcaaacattgcaagcagcaaacagcaaacacacagccctccctgcctgctgaccttggagctggggcagaggtcagagacctctctgggcccatgccacctccaacatccactcgaccccttggaatttcggtggagaggagcagaggttgtcctggcgtggtttaggtagtgtgagagggtctagaaggctcagaggcacacaggagtttctgggctcaccctgcccccttccaacccctcagttcccatcctccagcagctgtttgtgtgctgcctctgaagtccacactgaacaaacttcagcctactcatgtccctaaaatgggcaaacattgcaagcagcaaacagcaaacacacagccctccctgcctgctgaccttggagctggggcagaggtcagagacctctctgggcccatgccacctccaacatccactcgaccccttggaatttcggtggagaggagcagaggttgtcctggcgtggtttaggtagtgtgagaggggtacccggggatcttgctaccagtggaacagccactaaggattctgcagtgagagcagagggccagctaagtggtactctcccagagactgtctgactcacgccaccccctccaccttggacacaggacgctgtggtttctgagccaggtacaatgactcctttcggtaagtgcagtggaagctgtacactgcccaggcaaagcgtccgggcagcgtaggcgggcgactcagatcccagccagtggacttagcccctgtttgctcctccgataactggggtgaccttggttaatattcaccagcagcctcccccgttgcccctctggatccactgcttaaatacggacgaggacagggccctgtctcctcagcttcaggcaccaccactgacctgggacagt

SEQ ID NO: 317 - DNA, 1089 bp, Artificial Sequence
  synthetic construct; promoter sequence
aggttaatttttaaaaagcagtcaaaagtccaagtggcccttggcagcatttactctctctgtttgctctggttaataatctcaggagcacaaacattccagatccaggttaatttttaaaaagcagtcaaaagtccaagtggcccttggcagcatttactctctctgtttgctctggttaataatctcaggagcacaaacattccagatccggcgcgccagggctggaagctacctttgacatcatttcctctgcgaatgcatgtataatttctacagaacctattagaaaggatcacccagcctctgcttttgtacaactttcccttaaaaaactgccaattccactgctgtttggcccaatagtgagaactttttcctgctgcctcttggtgcttttgcctatggcccctattctgcctgctgaagacactcttgccagcatggacttaaacccctccagctctgacaatcctctttctcttttgttttacatgaagggtctggcagccaaagcaatcactcaaagttcaaaccttatcattttttgctttgttcctcttggccttggttttgtacatcagctttgaaaataccatcccagggttaatgctggggttaatttataactaagagtgctctagttttgcaatacaggacatgctataaaaatggaaagatgttgctttctgagaggatcttgctaccagtggaacagccactaaggattctgcagtgagagcagagggccagctaagtggtactctcccagagactgtctgactcacgccaccccctccaccttggacacaggacgctgtggtttctgagccaggtacagtgactcctttcggtaagtgcagtggaagctgtacactgcccaggcaaagcgtccgggcagcgtaggcgggcgactcagatcccagccagtggacttagcccctgtttgctcctccgataactggggtgaccttggttaatattcaccagcagcctcccccgttgcccctctggatccactgcttaaatacggacgaggacagggccctgtctcctcagcttcaggcaccaccactgacctgggacagt

SEQ ID NO: 318 - DNA, 1430 bp, Artificial Sequence
  synthetic construct; promoter sequence
aggctcagaggcacacaggagtttctgggctcaccctgcccccttccaacccctcagttcccatcctccagcagctgtttgtgtgctgcctctgaagtccacactgaacaaacttcagcctactcatgtccctaaaatgggcaaacattgcaagcagcaaacagcaaacacacagccctccctgcctgctgaccttggagctggggcagaggtcagagacctctctgggcccatgccacctccaacatccactcgaccccttggaatttcggtggagaggagcagaggttgtcctggcgtggtttaggtagtgtgagagggtctagagcccttaagctagcaggttaatttttaaaaagcagtcaaaagtccaagtggcccttggcagcatttactctctctgtttgctctggttaataatctcaggagcacaaacattccagatccaggttaatttttaaaaagcagtcaaaagtccaagtggcccttggcagcatttactctctctgtttgctctggttaataatctcaggagcacaaacattccagatccggcgcgccagggctggaagctacctttgacatcatttcctctgcgaatgcatgtataatttctacagaacctattagaaaggatcacccagcctctgcttttgtacaactttcccttaaaaaactgccaattccactgctgtttggcccaatagtgagaactttttcctgctgcctcttggtgcttttgcctatggcccctattctgcctgctgaagacactcttgccagcatggacttaaacccctccagctctgacaatcctctttctcttttgttttacatgaagggtctggcagccaaagcaatcactcaaagttcaaaccttatcattttttgctttgttcctcttggccttggttttgtacatcagctttgaaaataccatcccagggttaatgctggggttaatttataactaagagtgctctagttttgcaatacaggacatgctataaaaatggaaagatgttgctttctgagaggatcttgctaccagtggaacagccactaaggattctgcagtgagagcagagggccagctaagtggtactctcccagagactgtctgactcacgccaccccctccaccttggacacaggacgctgtggtttctgagccaggtacagtgactcctttcggtaagtgcagtggaagctgtacactgcccaggcaaagcgtccgggcagcgtaggcgggcgactcagatcccagccagtggacttagcccctgtttgctcctccgataactggggtgaccttggttaatattcaccagcagcctcccccgttgcccctctggatccactgcttaaatacggacgaggacagggccctgtctcctcagcttcaggcaccaccactgacctgggacagt

SEQ ID NO: 319 - DNA, 1318 bp, Artificial Sequence
  synthetic construct; promoter sequence
aggttaatttttaaaaagcagtcaaaagtccaagtggcccttggcagcatttactctctctgtttgctctggttaataatctcaggagcacaaacattccagatccaggttaatttttaaaaagcagtcaaaagtccaagtggcccttggcagcatttactctctctgtttgctctggttaataatctcaggagcacaaacattccagatccggcgcgccagggctggaagctacctttgacatcatttcctctgcgaatgcatgtataatttctacagaacctattagaaaggatcacccagcctctgcttttgtacaactttcccttaaaaaactgccaattccactgctgtttggcccaatagtgagaactttttcctgctgcctcttggtgcttttgcctatggcccctattctgcctgctgaagacactcttgccagcatggacttaaacccctccagctctgacaatcctctttctcttttgttttacatgaagggtctggcagccaaagcaatcactcaaagttcaaaccttatcattttttgctttgttcctcttggccttggttttgtacatcagctttgaaaataccatcccagggttaatgctggggttaatttataactaagagtgctctagttttgcaatacaggacatgctataaaaatggaaagatgttgctttctgagaggatcttgctaccagtggaacagccactaaggattctgcagtgagagcagagggccagctaagtggtactctcccagagactgtctgactcacgccaccccctccaccttggacacaggacgctgtggtttctgagccaggtacagtgactcctttcggtaagtgcagtggaagctgtacactgcccaggcaaagcgtccgggcagcgtaggcgggcgactcagatcccagccagtggacttagcccctgtttgctcctccgataactggggtgaccttggttaatattcaccagcagcctcccccgttgcccctctggatccactgcttaaatacggacgaggacagggccctgtctcctcagcttcaggcaccaccactgacctgggacagtaaaacaggtaagtccgctgtttgtgtgctgcctctgaagtccacactgaacaaacttcagcctactcatgtccctaaaatgggcaaacattgcaagcagcaaacagcaaacacacagccctccctgcctgctgaccttggagctggggcagaggtcagagacctctctggcctctactaaccatgttcatgttttctttttttttctacaggtcctgggtgacgaacag

SEQ ID NO: 320 - DNA, 1579 bp, Artificial Sequence
  synthetic construct; promoter sequence
aggctcagaggcacacaggagtttctgggctcaccctgcccccttccaacccctcagttcccatcctccagcagctgtttgtgtgctgcctctgaagtccacactgaacaaacttcagcctactcatgtccctaaaatgggcaaacattgcaagcagcaaacagcaaacacacagccctccctgcctgctgaccttggagctggggcagaggtcagagacctctctgggcccatgccacctccaacatccactcgaccccttggaatttcggtggagaggagcagaggttgtcctggcgtggtttaggtagtgtgagagggccactacgggtttaggctgcccatgtaaggaggcaaggcctggggacacccgagatgcctggttataattaacccagacatgtggctgccccccccccccccaacacctgctgcctctaaaaataaccctgtccctggtggatcccactacgggtttaggctgcccatgtaaggaggcaaggcctggggacacccgagatgcctggttataattaacccagacatgtggctgccccccccccccccaacacctgctgcctctaaaaataaccctgtccctggtggatcccactacgggtttaggctgcccatgtaaggaggcaaggcctggggacacccgagatgcctggttataattaacccagacatgtggctgccccccccccccccaacacctgctgcctctaaaaataaccctgtccctggtggatcccctgcatgcgaagatcttcgaacaaggctgtgggggactgagggcaggctgtaacaggcttgggggccagggcttatacgtgcctgggactcccaaagtattactgttccatgttcccggcgaagggccagctgtcccccgccagctagactcagcacttagtttaggaaccagtgagcaagtcagcccttggggcagcccatacaaggccatggggctgggcaagctgcacgcctgggtccggggtgggcacggtgcccgggcaacgagctgaaagctcatctgctctcaggggcccctccctggggacagcccctcctggctagtcacaccctgtaggctcctctatataacccaggggcacaggggctgccctcattctaccaccacctccacagcacagacagacactcaggagccagccagcgtcgagatcttgctaccagtggaacagccactaaggattctgcagtgagagcagagggccagctaagtggtactctcccagagactgtctgactcacgccaccccctccaccttggacacaggacgctgtggtttctgagccaggtacagtgactcctttcggtaagtgcagtggaagctgtacactgcccaggcaaagcgtccgggcagcgtaggcgggcgactcagatcccagccagtggacttagcccctgtttgctcctccgataactggggtgaccttggttaatattcaccagcagcctcccccgttgcccctctggatccactgcttaaatacggacgaggacagggccctgtctcctcagcttcaggcaccaccactgacctgggacagt

SEQ ID NO: 321 - DNA, 1080 bp, Artificial Sequence
  synthetic construct; promoter sequence
aggctcagaggcacacaggagtttctgggctcaccctgcccccttccaacccctcagttcccatcctccagcagctgtttgtgtgctgcctctgaagtccacactgaacaaacttcagcctactcatgtccctaaaatgggcaaacattgcaagcagcaaacagcaaacacacagccctccctgcctgctgaccttggagctggggcagaggtcagagacctctctgggcccatgccacctccaacatccactcgaccccttggaatttcggtggagaggagcagaggttgtcctggcgtggtttaggtagtgtgagaggggtacccggggatcttgctaccagtctagaggccgtccgccctcggcaccatcctcacgacacccaaatatggcgacgggtgaggaatggtggggagttatttttagagcggtgaggaaggtgggcaggcagcaggtgttggcgctctaaaaataactcccgggagttatttttagagcggaggaatggtggacacccaaatatggcgacggttcctcacccgtcgccatatttgggtgtccgccctcggccggggccgcattcctgggggccgggcggtgctcccgcccgcctcgataaaaggctccggggccggcggcggcccacgagctacccggaggagcgggaggcgccaagcgtgagtatcgatcttgctaccagtggaacagccactaaggattctgcagtgagagcagagggccagctaagtggtactctcccagagactgtctgactcacgccaccccctccaccttggacacaggacgctgtggtttctgagccaggtacagtgactcctttcggtaagtgcagtggaagctgtacactgcccaggcaaagcgtccgggcagcgtaggcgggcgactcagatcccagccagtggacttagcccctgtttgctcctccgataactggggtgaccttggttaatattcaccagcagcctcccccgttgcccctctggatccactgcttaaatacggacgaggacagggccctgtctcctcagcttcaggcaccaccactgacctgggacagt

SEQ ID NO: 322 - DNA, 568 bp, Artificial Sequence
  synthetic construct; promoter sequence
gaatggtggacacccaaatatggcgacggttcctcacccgtcgccatatttgggtgtccgccctcggccggggccgcattcctgggggccgggcggtgctcccgcccgcctcgataaaaggctccggggccggcggcggcccacgagctacccggaggagcgggaggcgccaagcgatcttgctaccagtggaacagccactaaggattctgcagtgagagcagagggccagctaagtggtactctcccagagactgtctgactcacgccaccccctccaccttggacacaggacgctgtggtttctgagccaggtacagtgactcctttcggtaagtgcagtggaagctgtacactgcccaggcaaagcgtccgggcagcgtaggcgggcgactcagatcccagccagtggacttagcccctgtttgctcctccgataactggggtgaccttggttaatattcaccagcagcctcccccgttgcccctctggatccactgcttaaatacggacgaggacagggccctgtctcctcagcttcaggcaccaccactgacctgggacagt

SEQ ID NO: 323 - DNA, 895 bp, Artificial Sequence
  synthetic construct; promoter sequence
aggctcagaggcacacaggagtttctgggctcaccctgcccccttccaacccctcagttcccatcctccagcagctgtttgtgtgctgcctctgaagtccacactgaacaaacttcagcctactcatgtccctaaaatgggcaaacattgcaagcagcaaacagcaaacacacagccctccctgcctgctgaccttggagctggggcagaggtcagagacctctctgggcccatgccacctccaacatccactcgaccccttggaatttcggtggagaggagcagaggttgtcctggcgtggtttaggtagtgtgagagggtctagagaatggtggacacccaaatatggcgacggttcctcacccgtcgccatatttgggtgtccgccctcggccggggccgcattcctgggggccgggcggtgctcccgcccgcctcgataaaaggctccggggccggcggcggcccacgagctacccggaggagcgggaggcgccaagcgatcttgctaccagtggaacagccactaaggattctgcagtgagagcagagggccagctaagtggtactctcccagagactgtctgactcacgccaccccctccaccttggacacaggacgctgtggtttctgagccaggtacagtgactcctttcggtaagtgcagtggaagctgtacactgcccaggcaaagcgtccgggcagcgtaggcgggcgactcagatcccagccagtggacttagcccctgtttgctcctccgataactggggtgaccttggttaatattcaccagcagcctcccccgttgcccctctggatccactgcttaaatacggacgaggacagggccctgtctcctcagcttcaggcaccaccactgacctgggacagt

SEQ ID NO: 324 - DNA, 1291 bp, Artificial Sequence
  synthetic construct; promoter sequence
aggctcagaggcacacaggagtttctgggctcaccctgcccccttccaacccctcagttcccatcctccagcagctgtttgtgtgctgcctctgaagtccacactgaacaaacttcagcctactcatgtccctaaaatgggcaaacattgcaagcagcaaacagcaaacacacagccctccctgcctgctgaccttggagctggggcagaggtcagagacctctctgggcccatgccacctccaacatccactcgaccccttggaatttcggtggagaggagcagaggttgtcctggcgtggtttaggtagtgtgagagggccactacgggtttaggctgcccatgtaaggaggcaaggcctggggacacccgagatgcctggttataattaacccagacatgtggctgccccccccccccccaacacctgctgcctctaaaaataaccctgtccctggtggatcccctgcatgcgaagatcttcgaacaaggctgtgggggactgagggcaggctgtaacaggcttgggggccagggcttatacgtgcctgggactcccaaagtattactgttccatgttcccggcgaagggccagctgtcccccgccagctagactcagcacttagtttaggaaccagtgagcaagtcagcccttggggcagcccatacaaggccatggggctgggcaagctgcacgcctgggtccggggtgggcacggtgcccgggcaacgagctgaaagctcatctgctctcaggggcccctccctggggacagcccctcctggctagtcacaccctgtaggctcctctatataacccaggggcacaggggctgccctcattctaccaccacctccacagcacagacagacactcaggagccagccagcgtcgagatcttgctaccagtggaacagccactaaggattctgcagtgagagcagagggccagctaagtggtactctcccagagactgtctgactcacgccaccccctccaccttggacacaggacgctgtggtttctgagccaggtacagtgactcctttcggtaagtgcagtggaagctgtacactgcccaggcaaagcgtccgggcagcgtaggcgggcgactcagatcccagccagtggacttagcccctgtttgctcctccgataactggggtgaccttggttaatattcaccagcagcctcccccgttgcccctctggatccactgcttaaatacggacgaggacagggccctgtctcctcagcttcaggcaccaccactgacctgggacagt

SEQ ID NO: 325 - DNA, 1147 bp, Artificial Sequence
  synthetic construct; promoter sequence
aggctcagaggcacacaggagtttctgggctcaccctgcccccttccaacccctcagttcccatcctccagcagctgtttgtgtgctgcctctgaagtccacactgaacaaacttcagcctactcatgtccctaaaatgggcaaacattgcaagcagcaaacagcaaacacacagccctccctgcctgctgaccttggagctggggcagaggtcagagacctctctgggcccatgccacctccaacatccactcgaccccttggaatttcggtggagaggagcagaggttgtcctggcgtggtttaggtagtgtgagagggccctgcatgcgaagatcttcgaacaaggctgtgggggactgagggcaggctgtaacaggcttgggggccagggcttatacgtgcctgggactcccaaagtattactgttccatgttcccggcgaagggccagctgtcccccgccagctagactcagcacttagtttaggaaccagtgagcaagtcagcccttggggcagcccatacaaggccatggggctgggcaagctgcacgcctgggtccggggtgggcacggtgcccgggcaacgagctgaaagctcatctgctctcaggggcccctccctggggacagcccctcctggctagtcacaccctgtaggctcctctatataacccaggggcacaggggctgccctcattctaccaccacctccacagcacagacagacactcaggagccagccagcgtcgagatcttgctaccagtggaacagccactaaggattctgcagtgagagcagagggccagctaagtggtactctcccagagactgtctgactcacgccaccccctccaccttggacacaggacgctgtggtttctgagccaggtacagtgactcctttcggtaagtgcagtggaagctgtacactgcccaggcaaagcgtccgggcagcgtaggcgggcgactcagatcccagccagtggacttagcccctgtttgctcctccgataactggggtgaccttggttaatattcaccagcagcctcccccgttgcccctctggatccactgcttaaatacggacgaggacagggccctgtctcctcagcttcaggcaccaccactgacctgggacagt

SEQ ID NO: 326 - DNA, 1490 bp, Artificial Sequence
  synthetic construct; promoter sequence
aggctcagaggcacacaggagtttctgggctcaccctgcccccttccaacccctcagttcccatcctccagcagctgtttgtgtgctgcctctgaagtccacactgaacaaacttcagcctactcatgtccctaaaatgggcaaacattgcaagcagcaaacagcaaacacacagccctccctgcctgctgaccttggagctggggcagaggtcagagacctctctgggcccatgccacctccaacatccactcgaccccttggaatttcggtggagaggagcagaggttgtcctggcgtggtttaggtagtgtgagagggcccttcagattaaaaataactgaggtaagggcctgggtaggggaggtggtgtgagacgctcctgtctctcctctatctgcccatcggccctttggggaggaggaatgtgcccaaggactaaaaaaaggccatggagccagaggggcgagggcaacagacctttcatgggcaaaccttggggccctgctgaagctttggcccactacgggtttaggctgcccatgtaaggaggcaaggcctggggacacccgagatgcctggttataattaacccagacatgtggctgccccccccccccccaacacctgctgcctctaaaaataaccctgtccctggtggatcccctgcatgcgaagatcttcgaacaaggctgtgggggactgagggcaggctgtaacaggcttgggggccagggcttatacgtgcctgggactcccaaagtattactgttccatgttcccggcgaagggccagctgtcccccgccagctagactcagcacttagtttaggaaccagtgagcaagtcagcccttggggcagcccatacaaggccatggggctgggcaagctgcacgcctgggtccggggtgggcacggtgcccgggcaacgagctgaaagctcatctgctctcaggggcccctccctggggacagcccctcctggctagtcacaccctgtaggctcctctatataacccaggggcacaggggctgccctcattctaccaccacctccacagcacagacagacactcaggagccagccagcgtcgagatcttgctaccagtggaacagccactaaggattctgcagtgagagcagagggccagctaagtggtactctcccagagactgtctgactcacgccaccccctccaccttggacacaggacgctgtggtttctgagccaggtacagtgactcctttcggtaagtgcagtggaagctgtacactgcccaggcaaagcgtccgggcagcgtaggcgggcgactcagatcccagccagtggacttagcccctgtttgctcctccgataactggggtgaccttggttaatattcaccagcagcctcccccgttgcccctctggatccactgcttaaatacggacgaggacagggccctgtctcctcagcttcaggcaccaccactgacctgggacagt

SEQ ID NO: 327 - DNA, 969 bp, Artificial Sequence; identical to SEQ ID NO: 315
  synthetic construct; promoter sequence

SEQ ID NO: 328 - DNA, 2074 bp, Artificial Sequence
  synthetic construct; promoter sequence
aggctcagaggcacacaggagtttctgggctcaccctgcccccttccaacccctcagttcccatcctccagcagctgtttgtgtgctgcctctgaagtccacactgaacaaacttcagcctactcatgtccctaaaatgggcaaacattgcaagcagcaaacagcaaacacacagccctccctgcctgctgaccttggagctggggcagaggtcagagacctctctgggcccatgccacctccaacatccactcgaccccttggaatttcggtggagaggagcagaggttgtcctggcgtggtttaggtagtgtgagagggcacacatacacgaacacacatacatatacatacattcacatatatgcacacacatacacatatacacgcatacacgtacacacaaatgcacactcacacatgcacacacatacataatatacacactctcacacatgcacatacacacatacatacacatacatgtgcatgcacacacacaaatacacatgcatacatccacattcacacagatgcagacacaaatgcacacacacacacacacacacacacacacacacacacacacacgcacactgccaccctgaactagtggtggctaaatgaacaataagtctccatcaccagcttggggggaggtaggtggtagtgtaggtgcccccattgtgtgatcatgttcattgtatgagtttgtctgtgttcattcatcatagtgacagtccccatgtgggtagcagagagtacgtgtgcatgcatcatctccgtgtttgctcatgagtgtgtatgtcagtgtgttccagtctttctgtgtgagtgtcgtccccaatcccccatccccccccccagatctctaattagtggtttggggtttgttccttttccctcctgttcctttcctcagcagcgcggcagcagcggcggcagcctcggtggtagcagcagcagcagcagcagcagcagcagcagcagcagcagcagcagcaacagaagctgccgcgccgctgagtagcagcaaggactccgagtcaagagtaggattgtaggattggatctgagtgggaacaagagtgagctggcctgagagaggagcagatgcctcccagcgccctcaggccacccattgccagtaatcttcaagccagacctcttgagaggagacgggacagccaaccctagcctacccaggtacagacactgggcagttctgggggactgcccacagatgcctattggattcctggggtatgtaggactcccgggtctaccagcccttttcacctttccccatagcacccccaaggaagctctgacaacttgcccatattcctgtttcccacccgtcccctgggcacccccttttcttctctccctcccagatcccttctttggggagctcagcaaatggagcaggaaatttggaccctctgcctccctctctcgccttcctcattggatccggagtcttctccgctgggaaagctgtaattagagggtggatccctacagacagagagcagcccccccacccccaccccccagtcccttctaactttagatctcttctctcccattctcccattctccctccctctcccttctccctctcccactggctcctcggttctctccatctgcctgactccttgggacccggtccccagatcttgctaccagtggaacagccactaaggattctgcagtgagagcagagggccagctaagtggtactctcccagagactgtctgactcacgccaccccctccaccttggacacaggacgctgtggtttctgagccaggtacagtgactcctttcggtaagtgcagtggaagctgtacactgcccaggcaaagcgtccgggcagcgtaggcgggcgactcagatcccagccagtggacttagcccctgtttgctcctccgataactggggtgaccttggttaatattcaccagcagcctcccccgttgcccctctggatccactgcttaaatacggacgaggacagggccctgtctcctcagcttcaggcaccaccactgacctgggacagt

SEQ ID NO: 329 - DNA, 1360 bp, Artificial Sequence
  synthetic construct; promoter sequence
cacacatacacgaacacacatacatatacatacattcacatatatgcacacacatacacatatacacgcatacacgtacacacaaatgcacactcacacatgcacacacatacataatatacacactctcacacatgcacatacacacatacatacacatacatgtgcatgcacacacacaaatacacatgcatacatccacattcacacagatgcagacacaaatgcacacacacacacacacacacacacacacacacacacacacacgcacactgccaccctgaactagtggtggctaaatgaacaataagtctccatcaccagcttggggggaggtaggtggtagtgtaggtgcccccattgtgtgatcatgttcattgtatgagtttgtctgtgttcattcatcatagtgacagtccccatgtgggtagcagagagtacgtgtgcatgcatcatctccgtgtttgctcatgagtgtgtatgtcagtgtgttccagtctttctgtgtgagtgtcgtccccaatcccccatccccccccccagatctctaattagtggtttggggtttgttccttttccctcctgttcctttcctcagcagcgcggcagcagcggcggcagcctcggtggtagcagcagcagcagcagcagcagcagcagcagcagcagcagcagcagcaacagaagctgccgcgccgctgagtagcagcaaggactccgagtcaagagtaggattgtaggattggatctgagtgggaacaagagtgagctggcctgagagaggagcagatgcctcccagcgccctcaggccacccattgccagtaatcttcaagccagacctcttgagaggagacgggacagccaaccctagcctacccaggtacagacactgggcagttctgggggactgcccacagatgcctattggattcctggggtatgtaggactcccgggtctaccagcccttttcacctttccccatagcacccccaaggaagctctgacaacttgcccatattcctgtttcccacccgtcccctgggcacccccttttcttctctccctcccagatcccttctttggggagctcagcaaatggagcaggaaatttggaccctctgcctccctctctcgccttcctcattggatccggagtcttctccgctgggaaagctgtaattagagggtggatccctacagacagagagcagcccccccacccccaccccccagtcccttctaactttagatctcttctctcccattctcccattctccctccctctcccttctccctctcccactggctcctcggttctctccatctgcctgactccttgggacccggtcccca

SEQ ID NO: 330 - DNA, 756 bp, Artificial Sequence
  synthetic construct; promoter sequence
cgcggcagcagcggcggcagcctcggtggtagcagcagcagcagcagcagcagcagcagcagcagcagcagcagcagcaacagaagctgccgcgccgctgagtagcagcaaggactccgagtcaagagtaggattgtaggattggatctgagtgggaacaagagtgagctggcctgagagaggagcagatgcctcccagcgccctcaggccacccattgccagtaatcttcaagccagacctcttgagaggagacgggacagccaaccctagcctacccaggtacagacactgggcagttctgggggactgcccacagatgcctattggattcctggggtatgtaggactcccgggtctaccagcccttttcacctttccccatagcacccccaaggaagctctgacaacttgcccatattcctgtttcccacccgtcccctgggcacccccttttcttctctccctcccagatcccttctttggggagctcagcaaatggagcaggaaatttggaccctctgcctccctctctcgccttcctcattggatccggagtcttctccgctgggaaagctgtaattagagggtggatccctacagacagagagcagcccccccacccccaccccccagtcccttctaactttagatctcttctctcccattctcccattctccctccctctcccttctccctctcccactggctcctcggttctctccatctgcctgactccttgggacccggtcccca

SEQ ID NO: 331 - protein, 244 aa, Artificial Sequence
  synthetic construct; antibody fragment
  SITE (224)..(244): This region may be absent in its entirety
  VARIANT (227)..(227): /replace="Leu"
  SITE (228)..(244): This region may be absent in its entirety
  SITE (234)..(244): This region may be absent in its entirety
EVQLVESGGKLLKPGGSLKLSCAASGFTFSSFAMSWFRQSPEKRLEWVAEISSGGSYTYYPDTVTGRFTISRDNAKNTLYLEMSSLRSEDTAMYYCARGLWGYYALDYWGQGTSVTVSSASTKGPSVFPLAPSSKSTSGGTAALGCLVKDYFPEPVTVSWNSGALTSGVHTFPAVLQSSGLYSLSSVVTVPSSSLGTQTYICNVNHKPSNTKVDKKVEPKSCDKTHTCPPCPAPELLGGPSVFL

SEQ ID NO: 332 - protein, 213 aa, Artificial Sequence
  synthetic construct; antibody fragment
QIVLIQSPAIMSASPGEKVTMTCSASSSVSYMYWYQQKPGSSPRLLIYDTSNLASGVPVRFSGSGSGTSYSLTISRMEAEDAATYYCQQWSGYPYTFGGGTKLEIKRTVAAPSVFIFPPSDEQLKSGTASVVCLLNNFYPREAKVQWKVDNALQSGNSQESVTEQDSKDSTYSLSSTLTLSKADYEKHKVYACEVTHQGLSSPVTKSFNRGEC

SEQ ID NO: 333 - protein, 245 aa, Artificial Sequence
  synthetic construct; antibody fragment
  SITE (225)..(245): This region may be absent in its entirety
  VARIANT (228)..(228): /replace="Leu"
  SITE (229)..(245): This region may be absent in its entirety
  SITE (235)..(245): This region may be absent in its entirety
EVQLVESGGGLVQPGGSLRLSCAASGFSLSNYYVTWVRQAPGKGLEWVGIIYGSDETAYATSAIGRFTISRDNSKNTLYLQMNSLRAEDTAVYYCARDDSSDWDAKFNLWGQGTLVTVSSASTKGPSVFPLAPSSKSTSGGTAALGCLVKDYFPEPVTVSWNSGALTSGVHTFPAVLQSSGLYSLSSVVTVPSSSLGTQTYICNVNHKPSNTKVDKRVEPKSCDKTHTCPPCPAPELLGGPSVFL

SEQ ID NO: 334 - protein, 217 aa, Artificial Sequence
  synthetic construct; antibody fragment
AIQMTQSPSSLSASVGDRVTITCQASQSINNELSWYQQKPGKAPKLLIYRASTLASGVPSRFSGSGSGTDFTLTISSLQPDDFATYYCQQGYSLRNIDNAFGGGTKVEIKRTVAAPSVFIFPPSDEQLKSGTASVVCLLNNFYPREAKVQWKVDNALQSGNSQESVTEQDSKDSTYSLSSTLTLSKADYEKHKVYACEVTHQGLSSPVTKSFNRGEC

SEQ ID NO: 335 - protein, 244 aa, Artificial Sequence
  synthetic construct; antibody fragment
  SITE (224)..(244): This region may be absent in its entirety
  VARIANT (227)..(227): /replace="Leu"
  SITE (228)..(244): This region may be absent in its entirety
  SITE (234)..(244): This region may be absent in its entirety
EVQLVESGGGLVQPGGSLRLSCAASGFTFSPFAMSWVRQAPGKGLEWVAKISPGGSWTYYSDTVTGRFTISRDNAKNSLYLQMNSLRAEDTAVYYCARQLWGYYALDIWGQGTTVTVSSASTKGPSVFPLAPSSKSTSGGTAALGCLVKDYFPEPVTVSWNSGALTSGVHTFPAVLQSSGLYSLSSVVTVPSSSLGTQTYICNVNHKPSNTKVDKKVEPKSCDKTHTCPPCPAPELLGGPSVFL

SEQ ID NO: 336 - protein, 213 aa, Artificial Sequence
  synthetic construct; antibody fragment
EIVLTQSPATLSLSPGERATLSCSASISVSYMYWYQQKPGQAPRLLIYDMSNLASGIPARFSGSGSGTDFTLTISSLEPEDFAVYYCMQWSGYPYTFGGGTKVEIKRTVAAPSVFIFPPSDEQLKSGTASVVCLLNNFYPREAKVQWKVDNALQSGNSQESVTEQDSKDSTYSLSSTLTLSKADYEKHKVYACEVTHQGLSSPVTKSFNRGEC

SEQ ID NO: 337 - protein, 242 aa, Artificial Sequence
  synthetic construct; antibody fragment
  SITE (223)..(242): This region may be absent in its entirety
  VARIANT (228)..(228): /replace="Ser"
  SITE (232)..(242): This region may be absent in its entirety
EVQLVESGGGLVQPGGSLRLSCAASGFNFNDYFMNWVRQAPGKGLEWVAQMRNKNYQYGTYYAESLEGRFTISRDDSKNSLYLQMNSLKTEDTAVYYCARESYYGFTSYWGQGTLVTVSSASTKGPSVFPLAPCSRSTSESTAALGCLVKDYFPEPVTVSWNSGALTSGVHTFPAVLQSSGLYSLSSVVTVPSSSLGTKTYTCNVDHKPSNTKVDKRVESKYGPPCPPCPAPEFLGGPSVFL

SEQ ID NO: 338 - protein, 214 aa, Artificial Sequence
  synthetic construct; antibody fragment
DIQMTQSPSSLSASVGDRVTITCQASQDIGISLSWYQQKPGKAPKLLIYNANNLADGVPSRFSGSGSGTDFTLTISSLQPEDFATYYCLQHNSAPYTFGQGTKLEIKRTVAAPSVFIFPPSDEQLKSGTASVVCLLNNFYPREAKVQWKVDNALQSGNSQESVTEQDSKDSTYSLSSTLTLSKADYEKHKVYACEVTHQGLSSPVTKSFNRGEC

SEQ ID NO: 339 - protein, 247 aa, Artificial Sequence
  synthetic construct; antibody fragment
  SITE (227)..(247): This region may be absent in its entirety
  VARIANT (230)..(230): /replace="Leu"
  SITE (231)..(247): This region may be absent in its entirety
  SITE (237)..(247): This region may be absent in its entirety
EVQLQESGPGLVKPSQTLSLTCTVSGGSITSRYYAWSWIRQPPGKGLEWIGVIDYDGDTYYSPSLKSRVSISWDTSKNQFSLKLSSVTPADTAVYYCARDPDVVTGFHYDYWGQGTMVTVSSASTKGPSVFPLAPSSKSTSGGTAALGCLVKDYFPEPVTVSWNSGALTSGVHTFPAVLQSSGLYSLSSVVTVPSSSLGTQTYICNVNHKPSNTKVDKKVEPKSCDKTHTCPPCPAPELLGGPSVFL

SEQ ID NO: 340 - protein, 216 aa, Artificial Sequence
  synthetic construct; antibody fragment
QSALTQPPSVSGTPGQSVTISCAGANNDIGTYAYVSWYQQLPGTAPKLMIYKVTTRASGIPDRFSGSKSGNTASLTISGLQAEDEADYYCASYRNFNNAVFGTGTKLTVLGQPKAAPSVTLFPPSSEELQANKATLVCLISDFYPGAVTVAWKADSSPVKAGVETTTPSKQSNNKYAASSYLSLTPEQWKSHRSYSCQVTHEGSTVEKTVAPTECS

SEQ ID NO: 341 - protein, 244 aa, Artificial Sequence
  synthetic construct; antibody fragment
  SITE (224)..(244): This region may be absent in its entirety
  VARIANT (227)..(227): /replace="Leu"
  SITE (228)..(244): This region may be absent in its entirety
  SITE (234)..(244): This region may be absent in its entirety
QVQLQESGPGLVRPSQTLSLTCTVSGYSITSDHAWSWVRQPPGRGLEWIGYISYSGITTYNPSLKSRVTMLRDTSKNQFSLRLSSVTAADTAVYYCARSLARTTAMDYWGQGSLVTVSSASTKGPSVFPLAPSSKSTSGGTAALGCLVKDYFPEPVTVSWNSGALTSGVHTFPAVLQSSGLYSLSSVVTVPSSSLGTQTYICNVNHKPSNTKVDKKVEPKSCDKTHTCPPCPAPELLGGPSVFL

SEQ ID NO: 342 - protein, 214 aa, Artificial Sequence [sequence omitted]

SEQ ID NO: 343 - DNA, 732 bp, Artificial Sequence
  synthetic construct; antibody fragment
  misc_feature (670)..(732): This region may be absent in its entirety
  variation (679)..(681): /replace="ctg"
  misc_feature (682)..(732): This region may be absent in its entirety
  misc_feature (700)..(732): This region may be absent in its entirety
gaagtgcagctggtggaaagcggcggcaaactgctgaaaccgggcggcagcctgaaactgagctgcgcggcgagcggctttacctttagcagctttgcgatgagctggtttcgccagagcccggaaaaacgcctggaatgggtggcggaaattagcagcggcggcagctatacctattatccggataccgtgaccggccgctttaccattagccgcgataacgcgaaaaacaccctgtatctggaaatgagcagcctgcgcagcgaagataccgcgatgtattattgcgcgcgcggcctgtggggctattatgcgctggattattggggccagggcaccagcgtgaccgtgagcagcgcgagcaccaaaggcccgagcgtgtttccgctggcgccgagcagcaaaagcaccagcggcggcaccgcggcgctgggctgcctggtgaaagattattttccggaaccggtgaccgtgagctggaacagcggcgcgctgaccagcggcgtgcatacctttccggcggtgctgcagagcagcggcctgtatagcctgagcagcgtggtgaccgtgccgagcagcagcctgggcacccagacctatatttgcaacgtgaaccataaaccgagcaacaccaaagtggataaaaaagtggaaccgaaaagctgcgataagacccacacctgccccccctgccccgcccccgagctgctgggcggccccagcgtgttcctg

SEQ ID NO: 344 - DNA, 639 bp, Artificial Sequence
  synthetic construct; antibody fragment
cagattgtgctgattcagagcccggcgattatgagcgcgagcccgggcgaaaaagtgaccatgacctgcagcgcgagcagcagcgtgagctatatgtattggtatcagcagaaaccgggcagcagcccgcgcctgctgatttatgataccagcaacctggcgagcggcgtgccggtgcgctttagcggcagcggcagcggcaccagctatagcctgaccattagccgcatggaagcggaagatgcggcgacctattattgccagcagtggagcggctatccgtatacctttggcggcggcaccaaactggaaattaaacgcaccgtggcggcgccgagcgtgtttatttttccgccgagcgatgaacagctgaaaagcggcaccgcgagcgtggtgtgcctgctgaacaacttttatccgcgcgaagcgaaagtgcagtggaaagtggataacgcgctgcagagcggcaacagccaggaaagcgtgaccgaacaggatagcaaagatagcacctatagcctgagcagcaccctgaccctgagcaaagcggattatgaaaaacataaagtgtatgcgtgcgaagtgacccatcagggcctgagcagcccggtgaccaaaagctttaaccgcggcgaatgc

SEQ ID NO: 345 - DNA, 735 bp, Artificial Sequence
  synthetic construct; antibody fragment
  misc_feature (673)..(735): This region may be absent in its entirety
  variation (682)..(684): /replace="ctg"
  misc_feature (685)..(735): This region may be absent in its entirety
  misc_feature (703)..(735): This region may be absent in its entirety
gaagtgcagctggtggaaagcggcggcggcctggtgcagccgggcggcagcctgcgcctgagctgcgcggcgagcggctttagcctgagcaactattatgtgacctgggtgcgccaggcgccgggcaaaggcctggaatgggtgggcattatttatggcagcgatgaaaccgcgtatgcgaccagcgcgattggccgctttaccattagccgcgataacagcaaaaacaccctgtatctgcagatgaacagcctgcgcgcggaagataccgcggtgtattattgcgcgcgcgatgatagcagcgattgggatgcgaaatttaacctgtggggccagggcaccctggtgaccgtgagcagcgcgagcaccaaaggcccgagcgtgtttccgctggcgccgagcagcaaaagcaccagcggcggcaccgcggcgctgggctgcctggtgaaagattattttccggaaccggtgaccgtgagctggaacagcggcgcgctgaccagcggcgtgcatacctttccggcggtgctgcagagcagcggcctgtatagcctgagcagcgtggtgaccgtgccgagcagcagcctgggcacccagacctatatttgcaacgtgaaccataaaccgagcaacaccaaagtggataaacgcgtggaaccgaaaagctgcgataagacccacacctgccccccctgccccgcccccgagctgctgggcggccccagcgtgttcctg

SEQ ID NO: 346 - DNA, 732 bp, Artificial Sequence
  synthetic construct; antibody fragment
  misc_feature (670)..(732): This region may be absent in its entirety
  variation (679)..(681): /replace="ctg"
  misc_feature (682)..(732): This region may be absent in its entirety
  misc_feature (700)..(732): This region may be absent in its entirety
gcgattcagatgacccagagcccgagcagcctgagcgcgagcgtgggcgatcgcgtgaccattacctgccaggcgagccagagcattaacaacgaactgagctggtatcagcagaaaccgggcaaagcgccgaaactgctgatttatcgcgcgagcaccctggcgagcggcgtgccgagccgctttagcggcagcggcagcggcaccgattttaccctgaccattagcagcctgcagccggatgattttgcgacctattattgccagcagggctatagcctgcgcaacattgataacgcgtttggcggcggcaccaaagtggaaattaaacgcaccgtggcggcgccgagcgtgtttatttttccgccgagcgatgaacagctgaaaagcggcaccgcgagcgtggtgtgcctgctgaacaacttttatccgcgcgaagcgaaagtgcagtggaaagtggataacgcgctgcagagcggcaacagccaggaaagcgtgaccgaacaggatagcaaagatagcacctatagcctgagcagcaccctgaccctgagcaaagcggattatgaaaaacataaagtgtatgcgtgcgaagtgacccatcagggcctgagcagcccggtgaccaaaagctttaaccgcggcgaatgcgaaccgaaaagctgcgataagacccacacctgccccccctgccccgcccccgagctgctgggcggccccagcgtgttcctg

SEQ ID NO: 347 - DNA, 732 bp, Artificial Sequence
  synthetic construct; antibody fragment
  misc_feature (670)..(732): /note="This region may be absent in its entirety"
  misc_feature (670)..(732): This region may be absent in its entirety
  variation (679)..(681): /replace="ctg"
  misc_feature (682)..(732): /note="This region may be absent in its entirety"
  misc_feature (700)..(732): /note="This region may be absent in its entirety"
gaagtgcagctggtggaaagcggcggcggcctggtgcagccgggcggcagcctgcgcctgagctgcgcggcgagcggctttacctttagcccgtttgcgatgagctgggtgcgccaggcgccgggcaaaggcctggaatgggtggcgaaaattagcccgggcggcagctggacctattatagcgataccgtgaccggccgctttaccattagccgcgataacgcgaaaaacagcctgtatctgcagatgaacagcctgcgcgcggaagataccgcggtgtattattgcgcgcgccagctgtggggctattatgcgctggatatttggggccagggcaccaccgtgaccgtgagcagcgcgagcaccaaaggcccgagcgtgtttccgctggcgccgagcagcaaaagcaccagcggcggcaccgcggcgctgggctgcctggtgaaagattattttccggaaccggtgaccgtgagctggaacagcggcgcgctgaccagcggcgtgcatacctttccggcggtgctgcagagcagcggcctgtatagcctgagcagcgtggtgaccgtgccgagcagcagcctgggcacccagacctatatttgcaacgtgaaccataaaccgagcaacaccaaagtggataaaaaagtggaaccgaaaagctgcgataagacccacacctgccccccctgccccgcccccgagctgctgggcggccccagcgtgttcctg

SEQ ID NO: 348 - DNA, 639 bp, Artificial Sequence
  synthetic construct; antibody fragment
gaaattgtgctgacccagagcccggcgaccctgagcctgagcccgggcgaacgcgcgaccctgagctgcagcgcgagcattagcgtgagctatatgtattggtatcagcagaaaccgggccaggcgccgcgcctgctgatttatgatatgagcaacctggcgagcggcattccggcgcgctttagcggcagcggcagcggcaccgattttaccctgaccattagcagcctggaaccggaagattttgcggtgtattattgcatgcagtggagcggctatccgtatacctttggcggcggcaccaaagtggaaattaaacgcaccgtggcggcgccgagcgtgtttatttttccgccgagcgatgaacagctgaaaagcggcaccgcgagcgtggtgtgcctgctgaacaacttttatccgcgcgaagcgaaagtgcagtggaaagtggataacgcgctgcagagcggcaacagccaggaaagcgtgaccgaacaggatagcaaagatagcacctatagcctgagcagcaccctgaccctgagcaaagcggattatgaaaaacataaagtgtatgcgtgcgaagtgacccatcagggcctgagcagcccggtgaccaaaagctttaaccgcggcgaatgc

SEQ ID NO: 349 - DNA, 726 bp, Artificial Sequence
  synthetic construct; antibody fragment
  misc_feature (667)..(726): This region may be absent in its entirety
  variation (682)..(683): /replace="ag"
  misc_feature (694)..(726): This region may be absent in its entirety
gaagtgcagctggtggaaagcggcggcggcctggtgcagccgggcggcagcctgcgcctgagctgcgcggcgagcggctttaactttaacgattattttatgaactgggtgcgccaggcgccgggcaaaggcctggaatgggtggcgcagatgcgcaacaaaaactatcagtatggcacctattatgcggaaagcctggaaggccgctttaccattagccgcgatgatagcaaaaacagcctgtatctgcagatgaacagcctgaaaaccgaagataccgcggtgtattattgcgcgcgcgaaagctattatggctttaccagctattggggccagggcaccctggtgaccgtgagcagcgcgagcaccaaaggcccgagcgtgtttccgctggcgccgtgcagccgcagcaccagcgaaagcaccgcggcgctgggctgcctggtgaaagattattttccggaaccggtgaccgtgagctggaacagcggcgcgctgaccagcggcgtgcatacctttccggcggtgctgcagagcagcggcctgtatagcctgagcagcgtggtgaccgtgccgagcagcagcctgggcaccaaaacctatacctgcaacgtggatcataaaccgagcaacaccaaagtggataaacgcgtggagagcaagtacggccccccctgccccccctgccccgcccccgagttcctgggcggccccagcgtgttcctg

SEQ ID NO: 350 - DNA, 642 bp, Artificial Sequence
  synthetic construct; antibody fragment
gatattcagatgacccagagcccgagcagcctgagcgcgagcgtgggcgatcgcgtgaccattacctgccaggcgagccaggatattggcattagcctgagctggtatcagcagaaaccgggcaaagcgccgaaactgctgatttataacgcgaacaacctggcggatggcgtgccgagccgctttagcggcagcggcagcggcaccgattttaccctgaccattagcagcctgcagccggaagattttgcgacctattattgcctgcagcataacagcgcgccgtatacctttggccagggcaccaaactggaaattaaacgcaccgtggcggcgccgagcgtgtttatttttccgccgagcgatgaacagctgaaaagcggcaccgcgagcgtggtgtgcctgctgaacaacttttatccgcgcgaagcgaaagtgcagtggaaagtggataacgcgctgcagagcggcaacagccaggaaagcgtgaccgaacaggatagcaaagatagcacctatagcctgagcagcaccctgaccctgagcaaagcggattatgaaaaacataaagtgtatgcgtgcgaagtgacccatcagggcctgagcagcccggtgaccaaaagctttaaccgcggcgaatgc

SEQ ID NO: 351 - DNA, 741 bp, Artificial Sequence
  synthetic construct; antibody fragment
  misc_feature (679)..(741): This region may be absent in its entirety
  variation (688)..(690): /replace="ctg"
  misc_feature (691)..(741): This region may be absent in its entirety
  misc_feature (709)..(741): This region may be absent in its entirety
gaagtgcagctgcaggaaagcggcccgggcctggtgaaaccgagccagaccctgagcctgacctgcaccgtgagcggcggcagcattaccagccgctattatgcgtggagctggattcgccagccgccgggcaaaggcctggaatggattggcgtgattgattatgatggcgatacctattatagcccgagcctgaaaagccgcgtgagcattagctgggataccagcaaaaaccagtttagcctgaaactgagcagcgtgaccccggcggataccgcggtgtattattgcgcgcgcgatccggatgtggtgaccggctttcattatgattattggggccagggcaccatggtgaccgtgagcagcgcgagcaccaaaggcccgagcgtgtttccgctggcgccgagcagcaaaagcaccagcggcggcaccgcggcgctgggctgcctggtgaaagattattttccggaaccggtgaccgtgagctggaacagcggcgcgctgaccagcggcgtgcatacctttccggcggtgctgcagagcagcggcctgtatagcctgagcagcgtggtgaccgtgccgagcagcagcctgggcacccagacctatatttgcaacgtgaaccataaaccgagcaacaccaaagtggataaaaaagtggaaccgaaaagctgcgataagacccacacctgccccccctgccccgcccccgagctgctgggcggccccagcgtgttcctg

SEQ ID NO: 352 - DNA, 648 bp, Artificial Sequence
  synthetic construct; antibody fragment
cagagcgcgctgacccagccgccgagcgtgagcggcaccccgggccagagcgtgaccattagctgcgcgggcgcgaacaacgatattggcacctatgcgtatgtgagctggtatcagcagctgccgggcaccgcgccgaaactgatgatttataaagtgaccacccgcgcgagcggcattccggatcgctttagcggcagcaaaagcggcaacaccgcgagcctgaccattagcggcctgcaggcggaagatgaagcggattattattgcgcgagctatcgcaactttaacaacgcggtgtttggcaccggcaccaaactgaccgtgctgggccagccgaaagcggcgccgagcgtgaccctgtttccgccgagcagcgaagaactgcaggcgaacaaagcgaccctggtgtgcctgattagcgatttttatccgggcgcggtgaccgtggcgtggaaagcggatagcagcccggtgaaagcgggcgtggaaaccaccaccccgagcaaacagagcaacaacaaatatgcggcgagcagctatctgagcctgaccccggaacagtggaaaagccatcgcagctatagctgccaggtgacccatgaaggcagcaccgtggaaaaaaccgtggcgccgaccgaatgcagc

SEQ ID NO: 353 - DNA, 732 bp, Artificial Sequence
  synthetic construct; antibody fragment
  misc_feature (670)..(732): This region may be absent in its entirety
  variation (679)..(681): /replace="ctg"
  misc_feature (682)..(732): /note="This region may be absent in its entirety"
  misc_feature (700)..(732): This region may be absent in its entirety
caggtgcagctgcaggaaagcggcccgggcctggtgcgcccgagccagaccctgagcctgacctgcaccgtgagcggctatagcattaccagcgatcatgcgtggagctgggtgcgccagccgccgggccgcggcctggaatggattggctatattagctatagcggcattaccacctataacccgagcctgaaaagccgcgtgaccatgctgcgcgataccagcaaaaaccagtttagcctgcgcctgagcagcgtgaccgcggcggataccgcggtgtattattgcgcgcgcagcctggcgcgcaccaccgcgatggattattggggccagggcagcctggtgaccgtgagcagcgcgagcaccaaaggcccgagcgtgtttccgctggcgccgagcagcaaaagcaccagcggcggcaccgcggcgctgggctgcctggtgaaagattattttccggaaccggtgaccgtgagctggaacagcggcgcgctgaccagcggcgtgcatacctttccggcggtgctgcagagcagcggcctgtatagcctgagcagcgtggtgaccgtgccgagcagcagcctgggcacccagacctatatttgcaacgtgaaccataaaccgagcaacaccaaagtggataaaaaagtggaaccgaaaagctgcgataagacccacacctgccccccctgccccgcccccgagctgctgggcggccccagcgtgttcctg

SEQ ID NO: 354 - DNA, 642 bp, Artificial Sequence
  synthetic construct; antibody fragment
gatattcagatgacccagagcccgagcagcctgagcgcgagcgtgggcgatcgcgtgaccattacctgccgcgcgagccaggatattagcagctatctgaactggtatcagcagaaaccgggcaaagcgccgaaactgctgatttattataccagccgcctgcatagcggcgtgccgagccgctttagcggcagcggcagcggcaccgattttacctttaccattagcagcctgcagccggaagatattgcgacctattattgccagcagggcaacaccctgccgtatacctttggccagggcaccaaagtggaaattaaacgcaccgtggcggcgccgagcgtgtttatttttccgccgagcgatgaacagctgaaaagcggcaccgcgagcgtggtgtgcctgctgaacaacttttatccgcgcgaagcgaaagtgcagtggaaagtggataacgcgctgcagagcggcaacagccaggaaagcgtgaccgaacaggatagcaaagatagcacctatagcctgagcagcaccctgaccctgagcaaagcggattatgaaaaacataaagtgtatgcgtgcgaagtgacccatcagggcctgagcagcccggtgaccaaaagctttaaccgcggcgaatgc

SEQ ID NO: 355 - protein, 205 aa, Artificial Sequence; identical to SEQ ID NO: 290
  synthetic construct; antibody fragment

SEQ ID NO: 356 - protein, 205 aa, Artificial Sequence; identical to SEQ ID NO: 296
  synthetic construct; antibody fragment

SEQ ID NO: 357 - protein, 205 aa, Artificial Sequence; identical to SEQ ID NO: 290
  synthetic construct; antibody fragment

SEQ ID NO: 358 - protein, 205 aa, Artificial Sequence; identical to SEQ ID NO: 292
  synthetic construct; antibody fragment

SEQ ID NO: 359 - protein, 204 aa, Artificial Sequence
  synthetic construct; antibody fragment
FPPKPKDTLMISRTPEVTCVVVDVSHEDPEVKFNWYVDGVEVHNAKTKPREEQYNSTYRVVSVLTVLHQDWLNGKEYKCKVSNKALPAPIEKTISKAKGQPREPQVYTLPPSRDELTKNQVSLTCLVKGFYPSDIAVEWESNGQPENNYKTTPPVLDSDGSFFLYSKLTVDKSRWQQGNVFSCSVMHEALHNHYTQKSLSLSPG

SEQ ID NO: 360 - protein, 249 aa, Artificial Sequence
  synthetic construct; antibody fragment
  SITE (229)..(249): This region may be absent in its entirety
  SITE (233)..(249): This region may be absent in its entirety
  SITE (239)..(249): This region may be absent in its entirety
EVQLVESGGGLVQPGGSLRLSCSASGFTFSSFGMHWVRQAPGKGLEWVAYISSGSSTIYYGDTVKGRFTISRDNAKNSLFLQMSSLRAEDTAVYYCAREGGYYYGRSYYTMDYWGQGTTVTVSSASTKGPSVFPLAPSSKSTSGGTAALGCLVKDYFPEPVTVSWNSGALTSGVHTFPAVLQSSGLYSLSSVVTVPSSSLGTQTYICNVNHKPSNTKVDKRVEPKSCDKTHTCPPCPAPELLGGPSVFL

SEQ ID NO: 361 - protein, 219 aa, Artificial Sequence
  synthetic construct; antibody fragment
DVVMTQSPLSLPVTPGAPASISCRSSQSIVHSNGNTYLEWYLQKPGQSPKLLIYKVSNRFSGVPDRFSGSGSGTDFTLRISRVEAEDVGIYYCFQGSHVPPTFGPGTKLEIKRTVAAPSVFIFPPSDEQLKSGTASVVCLLNNFYPREAKVQWKVDNALQSGNSQESVTEQDSKDSTYSLSSTLTLSKADYEKHKVYACEVTHQGLSSPVTKSFNRGEC

SEQ ID NO: 362 - protein, 238 aa, Artificial Sequence
  synthetic construct; antibody fragment
  SITE (228)..(238): This region may be absent in its entirety
  SITE (234)..(238): This region may be absent in its entirety
QVQLVQSGAEVKKPGASVKVSCKASGHIFSNYWIQWVRQAPGQGLEWMGEILPGSGHTEYTENFKDRVTMTRDTSTSTVYMELSSLRSEDTAVYYCARYFFGSSPNWYFDVWGQGTLVTVSSASTKGPSVFPLAPCSRSTSESTAALGCLVKDYFPEPVTVSWNSGALTSGVHTFPAVLQSSGLYSLSSVVTVPSSNFGTQTYTCNVDHKPSNTKVDKTVERKCCVECPPCPAPPVAG

SEQ ID NO: 363 - protein, 214 aa, Artificial Sequence [sequence omitted]

SEQ ID NO: 364 - protein, 246 aa, Artificial Sequence
  synthetic construct; antibody fragment
  SITE (226)..(246): This region may be absent in its entirety
  VARIANT (229)..(229): /replace="Leu"
  SITE (230)..(246): This region may be absent in its entirety
  SITE (236)..(246): This region may be absent in its entirety
EVQLVQSGAEVKKPGASVKVSCKASGYTFTSYVIHWVRQRPGQGLAWMGYINPYNDGTKYNERFKGKVTITSDRSTSTVYMELSSLRSEDTAVYLCGREGIRYYGLLGDYWGQGTLVTVSSASTKGPSVFPLAPSSKSTSGGTAALGCLVKDYFPEPVTVSWNSGALTSGVHTFPAVLQSSGLYSLSSVVTVPSSSLGTQTYICNVNHKPSNTKVDKKVEPKSCDKTHTCPPCPAPELLGGPSVFL

SEQ ID NO: 365 - protein, 214 aa, Artificial Sequence
  synthetic construct; antibody fragment
DIQMTQSPSSLSASVGDRVTITCGTSEDIINYLNWYQQKPGKAPKLLIYHTSRLQSGVPSRFSGSGSGTDFTLTISSLQPEDFATYYCQQGYTLPYTFGQGTKVEIKRTVAAPSVFIFPPSDEQLKSGTASVVCLLNNFYPREAKVQWKVDNALQSGNSQESVTEQDSKDSTYSLSSTLTLSKADYEKHKVYACEVTHQGLSSPVTKSFNRGEC

SEQ ID NO: 366 - protein, 238 aa, Artificial Sequence
  synthetic construct; antibody fragment
  SITE (219)..(238): This region may be absent in its entirety
  VARIANT (224)..(224): /replace="Ser"
  SITE (228)..(238): This region may be absent in its entirety
EVQLVESGGGLVQPGGSLRLSCAVSGLSLTSNSVNWIRQAPGKGLEWVGLIWSNGDTDYNSAIKSRFTISRDTSKSTVYLQMNSLRAEDTAVYYCAREYYGYFDYWGQGTLVTVSSASTKGPSVFPLAPCSRSTSESTAALGCLVKDYFPEPVTVSWNSGALTSGVHTFPAVLQSSGLYSLSSVVTVPSSSLGTKTYTCNVDHKPSNTKVDKRVESKYGPPCPPCPAPEFLGGPSVFL

SEQ ID NO: 367 - protein, 214 aa, Artificial Sequence
  synthetic construct; antibody fragment
DIQMTQSPSSLSASVGDRVTITCLASEGISSYLAWYQQKPGKAPKLLIYGANSLQTGVPSRFSGSGSATDYTLTISSLQPEDFATYYCQQSYKFPNTFGQGTKVEVKRTVAAPSVFIFPPSDEQLKSGTASVVCLLNNFYPREAKVQWKVDNALQSGNSQESVTEQDSKDSTYSLSSTLTLSKADYEKHKVYACEVTHQGLSSPVTKSFNRGEC

SEQ ID NO: 368 - protein, 244 aa, Artificial Sequence
  synthetic construct; antibody fragment
  SITE (225)..(244): /note="This region may be absent in its entirety"
  VARIANT (230)..(230): /replace="Ser"
  SITE (234)..(244): This region may be absent in its entirety
QVQLVQSGAEVKKPGASVKVSCKASGYTFTNYGLSWVRQAPGQGLEWMGWISANNGDTNYGQEFQGRVTMTTDTSTSTAYMELRSLRSDDTAVYYCARDSSSSWARWFFDLWGRGTLVTVSSASTKGPSVFPLAPCSRSTSESTAALGCLVKDYFPEPVTVSWNSGALTSGVHTFPAVLQSSGLYSLSSVVTVPSSSLGTKTYTCNVDHKPSNTKVDKRVESKYGPPCPPCPAPEFLGGPSVFL

SEQ ID NO: 369 - protein, 214 aa, Artificial Sequence
  synthetic construct; antibody fragment
SYVLTQPPSVSVAPGKTARITCGGNIIGSKLVHWYQQKPGQAPVLVIYDDGDRPSGIPERFSGSNSGNTATLTISRVEAGDEADYYCQVWDTGSDPVVFGGGTKLTVLGQPKAAPSVTLFPPSSEELQANKATLVCLISDFYPGAVTVAWKADSSPVKAGVETTTPSKQSNNKYAASSYLSLTPEQWKSHRSYSCQVTHEGSTVEKTVAPTECS

SEQ ID NO: 370 - protein, 237 aa, Artificial Sequence
  synthetic construct; antibody fragment
  SITE (227)..(237): This region may be absent in its entirety
  SITE (233)..(237): This region may be absent in its entirety
QVQLVQSGAEVKKPGASVKVSCKASGYTFTGYIMNWVRQAPGQGLEWMGLINPYNGGTDYNPQFQDRVTITADKSTSTAYMELSSLRSEDTAVYYCARDGYDDGPYTLETWGQGTLVTVSSASTKGPSVFPLAPSSKSTSGGTAALGCLVKDYFPEPVTVSWNSGALTSGVHTFPAVLQSSGLYSLSSVVTVPSSNFGTQTYTCNVDHKPSNTKVDKTVERKSCVECPPCPAPPVAG

SEQ ID NO: 371 - protein, 214 aa, Artificial Sequence
  synthetic construct; antibody fragment
DIQMTQSPSSLSASVGDRVTITCQASEDIYSFVAWYQQKPGKAPKLLIYNAQTEAQGVPSRFSGSGSGTDFTLTISSLQPEDFATYYCQHHYDSPLTFGGGTKVEIKRTVAAPSVFIFPPSDEQLKSGTASVVCLLNNFYPREAKVQWKVDNALQSGNSQESVTEQDSKDSTYSLSSTLTLSKADYEKHKVYACEVTHQGLSSPVTKSFNRGEC

SEQ ID NO: 372 - protein, 242 aa, Artificial Sequence
  synthetic construct; antibody fragment
  SITE (222)..(242): This region may be absent in its entirety
  VARIANT (225)..(225): /replace="Leu"
  SITE (226)..(242): This region may be absent in its entirety
  SITE (232)..(242): This region may be absent in its entirety
EVQLVESGGGLVQPGGSLRLSCAVSGYSITSGYSWNWIRQAPGKGLEWVASITYDGSTNYADSVKGRFTISRDDSKNTFYLQMNSLRAEDTAVYYCARGSHYFGHWHFAVWGQGTLVTVSSGPSVFPLAPSSKSTSGGTAALGCLVKDYFPEPVTVSWNSGALTSGVHTFPAVLQSSGLYSLSSVVTVPSSSLGTQTYICNVNHKPSNTKVDKKAEPKSCDKTHTCPPCPAPELLGGPSVFL

SEQ ID NO: 373 - protein, 215 aa, Artificial Sequence
  synthetic construct; antibody fragment
DIQLTQSPSSLSASVGDRVTITCRASQSVDYDGDSYMNWYQQKPGKAPKLLIYAASYLESGVPSRFSGSGSGTDFTLTISSLQPEDFATYYCQQSHEDPYTFGQGTKVEIKRTVAAPSVFIFPPSDEQLKSGTASVVCLLNNFYPREAKVQWKVDNALQSGNSQESVTEQDSKDSTYSLSSTLTLSKADYEKHKVYACEVTHQGLSSPVTKSFNR

SEQ ID NO: 374 - protein, 238 aa, Artificial Sequence
  synthetic construct; antibody fragment
  SITE (228)..(238): This region may be absent in its entirety
  SITE (234)..(238): This region may be absent in its entirety
QMQLVESGGGVVQPGRSLRLSCAASGFTFRTYGMHWVRQAPGKGLEWVAVIWYDGSNKHYADSVKGRFTITRDNSKNTLNLQMNSLRAEDTAVYYCARAPQWELVHEAFDIWGQGTMVTVSSASTKGPSVFPLAPCSRSTSESTAALGCLVKDYFPEPVTVSWNSGALTSGVHTFPAVLQSSGLYSLSSVVTVPSSNFGTQTYTCNVDHKPSNTKVDKTVERKCCVECPPCPAPPVAG

SEQ ID NO: 375 - protein, 214 aa, Artificial Sequence
  synthetic construct; antibody fragment
SYVLTQPPSVSVAPGQTARITCGGNNLGSKSVHWYQQKPGQAPVLVVYDDSDRPSWIPERFSGSNSGNTATLTISRGEAGDEADYYCQVWDSSSDHVVFGGGTKLTVLGQPKAAPSVTLFPPSSEELQANKATLVCLISDFYPGAVTVAWKADSSPVKAGVETTTPSKQSNNKYAASSYLSLTPEQWKSHRSYSCQVTHEGSTVEKTVAPTECS

SEQ ID NO: 376 - DNA, 747 bp, Artificial Sequence
  synthetic construct; antibody fragment
  misc_feature (685)..(747): This region may be absent in its entirety
  variation (694)..(696): /replace="ctg"
  misc_feature (697)..(747): This region may be absent in its entirety
  misc_feature (715)..(747): This region may be absent in its entirety
gaagtgcagctggtggaaagcggcggcggcctggtgcagccgggcggcagcctgcgcctgagctgcagcgcgagcggctttacctttagcagctttggcatgcattgggtgcgccaggcgccgggcaaaggcctggaatgggtggcgtatattagcagcggcagcagcaccatttattatggcgataccgtgaaaggccgctttaccattagccgcgataacgcgaaaaacagcctgtttctgcagatgagcagcctgcgcgcggaagataccgcggtgtattattgcgcgcgcgaaggcggctattattatggccgcagctattataccatggattattggggccagggcaccaccgtgaccgtgagcagcgcgagcaccaaaggcccgagcgtgtttccgctggcgccgagcagcaaaagcaccagcggcggcaccgcggcgctgggctgcctggtgaaagattattttccggaaccggtgaccgtgagctggaacagcggcgcgctgaccagcggcgtgcatacctttccggcggtgctgcagagcagcggcctgtatagcctgagcagcgtggtgaccgtgccgagcagcagcctgggcacccagacctatatttgcaacgtgaaccataaaccgagcaacaccaaagtggataaacgcgtggaaccgaaaagctgcgataagacccacacctgccccccctgccccgcccccgagctggccggcgcccccagcgtgttcctg

SEQ ID NO: 377 - DNA, 657 bp, Artificial Sequence
  synthetic construct; antibody fragment
gatgtggtgatgacccagagcccgctgagcctgccggtgaccccgggcgcgccggcgagcattagctgccgcagcagccagagcattgtgcatagcaacggcaacacctatctggaatggtatctgcagaaaccgggccagagcccgaaactgctgatttataaagtgagcaaccgctttagcggcgtgccggatcgctttagcggcagcggcagcggcaccgattttaccctgcgcattagccgcgtggaagcggaagatgtgggcatttattattgctttcagggcagccatgtgccgccgacctttggcccgggcaccaaactggaaattaaacgcaccgtggcggcgccgagcgtgtttatttttccgccgagcgatgaacagctgaaaagcggcaccgcgagcgtggtgtgcctgctgaacaacttttatccgcgcgaagcgaaagtgcagtggaaagtggataacgcgctgcagagcggcaacagccaggaaagcgtgaccgaacaggatagcaaagatagcacctatagcctgagcagcaccctgaccctgagcaaagcggattatgaaaaacataaagtgtatgcgtgcgaagtgacccatcagggcctgagcagcccggtgaccaaaagctttaaccgcggcgaatgc

SEQ ID NO: 378 - DNA, 714 bp, Artificial Sequence
  synthetic construct; antibody fragment
  misc_feature (682)..(714): This region may be absent in its entirety
  misc_feature (700)..(714): This region may be absent in its entirety
caggtgcagctggtgcagagcggcgcggaagtgaaaaaaccgggcgcgagcgtgaaagtgagctgcaaagcgagcggccatatttttagcaactattggattcagtgggtgcgccaggcgccgggccagggcctggaatggatgggcgaaattctgccgggcagcggccataccgaatataccgaaaactttaaagatcgcgtgaccatgacccgcgataccagcaccagcaccgtgtatatggaactgagcagcctgcgcagcgaagataccgcggtgtattattgcgcgcgctatttttttggcagcagcccgaactggtattttgatgtgtggggccagggcaccctggtgaccgtgagcagcgcgagcaccaaaggcccgagcgtgtttccgctggcgccgtgcagccgcagcaccagcgaaagcaccgcggcgctgggctgcctggtgaaagattattttccggaaccggtgaccgtgagctggaacagcggcgcgctgaccagcggcgtgcatacctttccggcggtgctgcagagcagcggcctgtatagcctgagcagcgtggtgaccgtgccgagcagcaactttggcacccagacctatacctgcaacgtggatcataaaccgagcaacaccaaagtggataaaaccgtggaacgcaaatgctgcgtggaatgccccccctgccccgccccccccgtggccggc

SEQ ID NO: 379 - DNA, 642 bp, Artificial Sequence
  synthetic construct; antibody fragment
gatattcagatgacccagagcccgagcagcctgagcgcgagcgtgggcgatcgcgtgaccattacctgcggcgcgagcgaaaacatttatggcgcgctgaactggtatcagcagaaaccgggcaaagcgccgaaactgctgatttatggcgcgaccaacctggcggatggcgtgccgagccgctttagcggcagcggcagcggcaccgattttaccctgaccattagcagcctgcagccggaagattttgcgacctattattgccagaacgtgctgaacaccccgctgacctttggccagggcaccaaagtggaaattaaacgcaccgtggcggcgccgagcgtgtttatttttccgccgagcgatgaacagctgaaaagcggcaccgcgagcgtggtgtgcctgctgaacaacttttatccgcgcgaagcgaaagtgcagtggaaagtggataacgcgctgcagagcggcaacagccaggaaagcgtgaccgaacaggatagcaaagatagcacctatagcctgagcagcaccctgaccctgagcaaagcggattatgaaaaacataaagtgtatgcgtgcgaagtgacccatcagggcctgagcagcccggtgaccaaaagctttaaccgcggcgaatgc

SEQ ID NO: 380 - DNA, 738 bp, Artificial Sequence
  synthetic construct; antibody fragment
  misc_feature (676)..(738): This region may be absent in its entirety
  variation (685)..(687): /replace="ctg"
  misc_feature (688)..(738): This region may be absent in its entirety
  misc_feature (706)..(738): This region may be absent in its entirety
gaagtgcagctggtgcagagcggcgcggaagtgaaaaaaccgggcgcgagcgtgaaagtgagctgcaaagcgagcggctatacctttaccagctatgtgattcattgggtgcgccagcgcccgggccagggcctggcgtggatgggctatattaacccgtataacgatggcaccaaatataacgaacgctttaaaggcaaagtgaccattaccagcgatcgcagcaccagcaccgtgtatatggaactgagcagcctgcgcagcgaagataccgcggtgtatctgtgcggccgcgaaggcattcgctattatggcctgctgggcgattattggggccagggcaccctggtgaccgtgagcagcgcgagcaccaaaggcccgagcgtgtttccgctggcgccgagcagcaaaagcaccagcggcggcaccgcggcgctgggctgcctggtgaaagattattttccggaaccggtgaccgtgagctggaacagcggcgcgctgaccagcggcgtgcatacctttccggcggtgctgcagagcagcggcctgtatagcctgagcagcgtggtgaccgtgccgagcagcagcctgggcacccagacctatatttgcaacgtgaaccataaaccgagcaacaccaaagtggataaaaaagtggaaccgaaaagctgcgataagacccacacctgccccccctgccccgcccccgagctggccggcgcccccagcgtgttcctg

SEQ ID NO: 381 - DNA, 642 bp, Artificial Sequence
  synthetic construct; antibody fragment
gatattcagatgacccagagcccgagcagcctgagcgcgagcgtgggcgatcgcgtgaccattacctgcggcaccagcgaagatattattaactatctgaactggtatcagcagaaaccgggcaaagcgccgaaactgctgatttatcataccagccgcctgcagagcggcgtgccgagccgctttagcggcagcggcagcggcaccgattttaccctgaccattagcagcctgcagccggaagattttgcgacctattattgccagcagggctataccctgccgtatacctttggccagggcaccaaagtggaaattaaacgcaccgtggcggcgccgagcgtgtttatttttccgccgagcgatgaacagctgaaaagcggcaccgcgagcgtggtgtgcctgctgaacaacttttatccgcgcgaagcgaaagtgcagtggaaagtggataacgcgctgcagagcggcaacagccaggaaagcgtgaccgaacaggatagcaaagatagcacctatagcctgagcagcaccctgaccctgagcaaagcggattatgaaaaacataaagtgtatgcgtgcgaagtgacccatcagggcctgagcagcccggtgaccaaaagctttaaccgcggcgaatgc

SEQ ID NO: 382 - DNA, 726 bp, Artificial Sequence
  synthetic construct; antibody fragment
  misc_feature (667)..(726): This region may be absent in its entirety
  variation (682)..(683): /replace="ag"
  misc_feature (694)..(726): This region may be absent in its entirety
gaagtgcagctggtggaaagcggcggcggcctggtgcagccgggcggcagcctgcgcctgagctgcgcggtgagcggcctgagcctgaccagcaacagcgtgaactggattcgccaggcgccgggcaaaggcctggaatgggtgggcctgatttggagcaacggcgataccgattataacagcgcgattaaaagccgctttaccattagccgcgataccagcaaaagcaccgtgtatctgcagatgaacagcctgcgcgcggaagataccgcggtgtattattgcgcgcgcgaatattatggctattttgattattggggccagggcaccctggtgaccgtgagcagcgcgagcaccaaaggcccgagcgtgtttccgctggcgccgtgcagccgcagcaccagcgaaagcaccgcggcgctgggctgcctggtgaaagattattttccggaaccggtgaccgtgagctggaacagcggcgcgctgaccagcggcgtgcatacctttccggcggtgctgcagagcagcggcctgtatagcctgagcagcgtggtgaccgtgccgagcagcagcctgggcaccaaaacctatacctgcaacgtggatcataaaccgagcaacaccaaagtggataaacgcgtggaaagcaaatatgagagcaagtacggccccccctgccccccctgccccgcccccgagttcctgggcggccccagcgtgttcctg

SEQ ID NO: 383 - DNA, 642 bp, Artificial Sequence
  synthetic construct; antibody fragment
gatattcagatgacccagagcccgagcagcctgagcgcgagcgtgggcgatcgcgtgaccattacctgcctggcgagcgaaggcattagcagctatctggcgtggtatcagcagaaaccgggcaaagcgccgaaactgctgatttatggcgcgaacagcctgcagaccggcgtgccgagccgctttagcggcagcggcagcgcgaccgattataccctgaccattagcagcctgcagccggaagattttgcgacctattattgccagcagagctataaatttccgaacacctttggccagggcaccaaagtggaagtgaaacgcaccgtggcggcgccgagcgtgtttatttttccgccgagcgatgaacagctgaaaagcggcaccgcgagcgtggtgtgcctgctgaacaacttttatccgcgcgaagcgaaagtgcagtggaaagtggataacgcgctgcagagcggcaacagccaggaaagcgtgaccgaacaggatagcaaagatagcacctatagcctgagcagcaccctgaccctgagcaaagcggattatgaaaaacataaagtgtatgcgtgcgaagtgacccatcagggcctgagcagcccggtgaccaaaagctttaaccgcggcgaatgc

SEQ ID NO: 384 - DNA, 732 bp, Artificial Sequence
  synthetic construct; antibody fragment
  misc_feature (673)..(732): This region may be absent in its entirety
  variation (688)..(689): /replace="ag"
  misc_feature (700)..(732): This region may be absent in its entirety
caggtgcagctggtgcagagcggcgcggaagtgaaaaaaccgggcgcgagcgtgaaagtgagctgcaaagcgagcggctatacctttaccaactatggcctgagctgggtgcgccaggcgccgggccagggcctggaatggatgggctggattagcgcgaacaacggcgataccaactatggccaggaatttcagggccgcgtgaccatgaccaccgataccagcaccagcaccgcgtatatggaactgcgcagcctgcgcagcgatgataccgcggtgtattattgcgcgcgcgatagcagcagcagctgggcgcgctggttttttgatctgtggggccgcggcaccctggtgaccgtgagcagcgcgagcaccaaaggcccgagcgtgtttccgctggcgccgtgcagccgcagcaccagcgaaagcaccgcggcgctgggctgcctggtgaaagattattttccggaaccggtgaccgtgagctggaacagcggcgcgctgaccagcggcgtgcatacctttccggcggtgctgcagagcagcggcctgtatagcctgagcagcgtggtgaccgtgccgagcagcagcctgggcaccaaaacctatacctgcaacgtggatcataaaccgagcaacaccaaagtggataaacgcgtggagagcaagtacggccccccctgccccccctgccccgcccccgagttcctgggcggccccagcgtgttcctg

SEQ ID NO: 385 - DNA, 642 bp, Artificial Sequence
  synthetic construct; antibody fragment
agctatgtgctgacccagccgccgagcgtgagcgtggcgccgggcaaaaccgcgcgcattacctgcggcggcaacattattggcagcaaactggtgcattggtatcagcagaaaccgggccaggcgccggtgctggtgatttatgatgatggcgatcgcccgagcggcattccggaacgctttagcggcagcaacagcggcaacaccgcgaccctgaccattagccgcgtggaagcgggcgatgaagcggattattattgccaggtgtgggataccggcagcgatccggtggtgtttggcggcggcaccaaactgaccgtgctgggccagccgaaagcggcgccgagcgtgaccctgtttccgccgagcagcgaagaactgcaggcgaacaaagcgaccctggtgtgcctgattagcgatttttatccgggcgcggtgaccgtggcgtggaaagcggatagcagcccggtgaaagcgggcgtggaaaccaccaccccgagcaaacagagcaacaacaaatatgcggcgagcagctatctgagcctgaccccggaacagtggaaaagccatcgcagctatagctgccaggtgacccatgaaggcagcaccgtggaaaaaaccgtggcgccgaccgaatgcagc

SEQ ID NO: 386 - DNA, 711 bp, Artificial Sequence
  synthetic construct; antibody fragment
  misc_feature (679)..(711): This region may be absent in its entirety
  misc_feature (697)..(711): This region may be absent in its entirety
caggtgcagctggtgcagagcggcgcggaagtgaaaaaaccgggcgcgagcgtgaaagtgagctgcaaagcgagcggctatacctttaccggctatattatgaactgggtgcgccaggcgccgggccagggcctggaatggatgggcctgattaacccgtataacggcggcaccgattataacccgcagtttcaggatcgcgtgaccattaccgcggataaaagcaccagcaccgcgtatatggaactgagcagcctgcgcagcgaagataccgcggtgtattattgcgcgcgcgatggctatgatgatggcccgtataccctggaaacctggggccagggcaccctggtgaccgtgagcagcgcgagcaccaaaggcccgagcgtgtttccgctggcgccgagcagcaaaagcaccagcggcggcaccgcggcgctgggctgcctggtgaaagattattttccggaaccggtgaccgtgagctggaacagcggcgcgctgaccagcggcgtgcatacctttccggcggtgctgcagagcagcggcctgtatagcctgagcagcgtggtgaccgtgccgagcagcaactttggcacccagacctatacctgcaacgtggatcataaaccgagcaacaccaaagtggataaaaccgtggaacgcaaaagctgcgtggaatgccccccctgccccgccccccccgtggccggc

SEQ ID NO: 387 - DNA, 642 bp, Artificial Sequence
  synthetic construct; antibody fragment
gatattcagatgacccagagcccgagcagcctgagcgcgagcgtgggcgatcgcgtgaccattacctgccaggcgagcgaagatatttatagctttgtggcgtggtatcagcagaaaccgggcaaagcgccgaaactgctgatttataacgcgcagaccgaagcgcagggcgtgccgagccgctttagcggcagcggcagcggcaccgattttaccctgaccattagcagcctgcagccggaagattttgcgacctattattgccagcatcattatgatagcccgctgacctttggcggcggcaccaaagtggaaattaaacgcaccgtggcggcgccgagcgtgtttatttttccgccgagcgatgaacagctgaaaagcggcaccgcgagcgtggtgtgcctgctgaacaacttttatccgcgcgaagcgaaagtgcagtggaaagtggataacgcgctgcagagcggcaacagccaggaaagcgtgaccgaacaggatagcaaagatagcacctatagcctgagcagcaccctgaccctgagcaaagcggattatgaaaaacataaagtgtatgcgtgcgaagtgacccatcagggcctgagcagcccggtgaccaaaagctttaaccgcggcgaatgc

SEQ ID NO: 388 - DNA, 708 bp, Artificial Sequence
  synthetic construct; antibody fragment
  misc_feature (646)..(708): This region may be absent in its entirety
  variation (655)..(657): /replace="ctg"
  misc_feature (658)..(708): This region may be absent in its entirety
  misc_feature (676)..(708): This region may be absent in its entirety
gaagtgcagctggtggaaagcggcggcggcctggtgcagccgggcggcagcctgcgcctgagctgcgcggtgagcggctatagcattaccagcggctatagctggaactggattcgccaggcgccgggcaaaggcctggaatgggtggcgagcattacctatgatggcagcaccaactatgcggatagcgtgaaaggccgctttaccattagccgcgatgatagcaaaaacaccttttatctgcagatgaacagcctgcgcgcggaagataccgcggtgtattattgcgcgcgcggcagccattattttggccattggcattttgcggtgtggggccagggcaccctggtgaccgtgagcagcggcccgagcgtgtttccgctggcgccgagcagcaaaagcaccagcggcggcaccgcggcgctgggctgcctggtgaaagattattttccggaaccggtgaccgtgagctggaacagcggcgcgctgaccagcggcgtgcatacctttccggcggtgctgcagagcagcggcctgtatagcctgagcagcgtggtgaccgtgccgagcagcagcctgggcacccagacctatatttgcaacgtgaaccataaaccgagcaacaccaaagtggataaaaaagcgaagacccacacctgccccccctgccccgcccccgagctggccggcgcccccagcgtgttcctg

SEQ ID NO: 389 - DNA, 645 bp, Artificial Sequence
  synthetic construct; antibody fragment
gatattcagctgacccagagcccgagcagcctgagcgcgagcgtgggcgatcgcgtgaccattacctgccgcgcgagccagagcgtggattatgatggcgatagctatatgaactggtatcagcagaaaccgggcaaagcgccgaaactgctgatttatgcggcgagctatctggaaagcggcgtgccgagccgctttagcggcagcggcagcggcaccgattttaccctgaccattagcagcctgcagccggaagattttgcgacctattattgccagcagagccatgaagatccgtatacctttggccagggcaccaaagtggaaattaaacgcaccgtggcggcgccgagcgtgtttatttttccgccgagcgatgaacagctgaaaagcggcaccgcgagcgtggtgtgcctgctgaacaacttttatccgcgcgaagcgaaagtgcagtggaaagtggataacgcgctgcagagcggcaacagccaggaaagcgtgaccgaacaggatagcaaagatagcacctatagcctgagcagcaccctgaccctgagcaaagcggattatgaaaaacataaagtgtatgcgtgcgaagtgacccatcagggcctgagcagcccggtgaccaaaagctttaaccgc

SEQ ID NO: 390 - DNA, 693 bp, Artificial Sequence
  synthetic construct; antibody fragment
  misc_feature (661)..(693): This region may be absent in its entirety
  misc_feature (679)..(693): This region may be absent in its entirety
cagatgcagctggtggaaagcggcggcggcgtggtgcagccgggccgcagcctgcgcctgagctgcgcggcgagcggctttacctttcgcacctatggcatgcattgggtgcgccaggcgccgggcaaaggcctggaatgggtggcggtgatttggtatgatggcagcaacaaacattatgcggatagcgtgaaaggccgctttaccattacccgcgataacagcaaaaacaccctgaacctgcagatgaacagcctgcgcgcggaagataccgcggtgtattattgcgcgcgcgcgccgcagtgggaactggtgcatgaagcgtttgatatttggggccagggcaccatggtgaccgtgagcagcgcgagcaccaaaggcccgagcgtgtttccgctggcgccgtgcagccgcagcaccagcgaaagcaccgcggcgctgggctgcctggtgaaagattattttccggaaccggtgaccgtgagctggaacagcggcgcgctgaccagcggcgtgcatacctttccggcggtgctgcagagcagcggcctgtatagcctgagcagcgtggtgaccgtgccgagcagcaactttggcacccagacctatacctgcaacgtggatcataaaccgagcaacaccaaagtggataaaaccgtgtgccccccctgccccgccccccccgtggccggc

SEQ ID NO: 391 - DNA, 642 bp, Artificial Sequence
  synthetic construct; antibody fragment
agctatgtgctgacccagccgccgagcgtgagcgtggcgccgggccagaccgcgcgcattacctgcggcggcaacaacctgggcagcaaaagcgtgcattggtatcagcagaaaccgggccaggcgccggtgctggtggtgtatgatgatagcgatcgcccgagctggattccggaacgctttagcggcagcaacagcggcaacaccgcgaccctgaccattagccgcggcgaagcgggcgatgaagcggattattattgccaggtgtgggatagcagcagcgatcatgtggtgtttggcggcggcaccaaactgaccgtgctgggccagccgaaagcggcgccgagcgtgaccctgtttccgccgagcagcgaagaactgcaggcgaacaaagcgaccctggtgtgcctgattagcgatttttatccgggcgcggtgaccgtggcgtggaaagcggatagcagcccggtgaaagcgggcgtggaaaccaccaccccgagcaaacagagcaacaacaaatatgcggcgagcagctatctgagcctgaccccggaacagtggaaaagccatcgcagctatagctgccaggtgacccatgaaggcagcaccgtggaaaaaaccgtggcgccgaccgaatgcagc

SEQ ID NO: 392 - protein, 205 aa, Artificial Sequence; identical to SEQ ID NO: 293
  synthetic construct; antibody fragment

SEQ ID NO: 393 - protein, 205 aa, Artificial Sequence
  synthetic construct; antibody fragment
FPPKPKDTLMISRTPEVTCVVVDVSQEDPEVQFNWYVDGVEVHNAKTKPREEQFNSTYRVVSVLTVLHQDWLNGKEYKCKVSNKGLPSSIEKTISKAKGQPREPQVYTLPPSQEEMTKNQVSLTCLVKGFYPSDIAVEWESNGQPENNYKTTPPVLDSDGSFFLYSRLTVDKSRWQEGNVFSCSVLHEALHSHYTQKSLSLSLGK

SEQ ID NO: 394 - protein, 205 aa, Artificial Sequence; identical to SEQ ID NO: 290
  synthetic construct; antibody fragment

SEQ ID NO: 395 - protein, 205 aa, Artificial Sequence; identical to SEQ ID NO: 292
  synthetic construct; antibody fragment

SEQ ID NO: 396 - protein, 205 aa, Artificial Sequence; identical to SEQ ID NO: 292
  synthetic construct; antibody fragment

SEQ ID NO: 397 - protein, 203 aa, Artificial Sequence
  synthetic construct; antibody fragment
FPPKPKDTLMISRTPEVTCVVVDVSQEDPEVQFNWYVDGVEVHNAKTKPREEQFNSTFRVVSVLTVVHQDWLNGKEYKCKVSNKGLPAPIEKTISKTKGQPREPQVYTLPPSQEEMTKNQVSLTCLVKGFYPSDIAVEWESNGQPENNYKTTPPMLDSDGSFFLYSKLTVDKSRWQEGNVFSCSVMHEALHNHYTQKSLSLSP

SEQ ID NO: 398 - protein, 205 aa, Artificial Sequence; identical to SEQ ID NO: 290
  synthetic construct; antibody fragment

SEQ ID NO: 399 - protein, 6 aa, Artificial Sequence
  synthetic construct; antibody fragment
EKHKVY

SEQ ID NO: 400 - protein, 19 aa, Artificial Sequence
  synthetic construct; antibody fragment
ESKYGPPCPPCPAPEAAGG

SEQ ID NO: 401-402 - skipped (2 entries)

SEQ ID NO: 403 - protein, 7 aa, Artificial Sequence
  synthetic construct; antibody fragment
EDIATYY

SEQ ID NO: 404-408 - skipped (5 entries)

SEQ ID NO: 409 - protein, 8 aa, Artificial Sequence
  synthetic construct; antibody fragment
EDVGIVYY

SEQ ID NO: 410 - skipped

SEQ ID NO: 411 - DNA, 1725 bp, Artificial Sequence
  synthetic construct; promoter sequence
gacattgattattgactagttattaatagtaatcaattacggggtcattagttcatagcccatatatggagttccgcgttacataacttacggtaaatggcccgcctggctgaccgcccaacgacccccgcccattgacgtcaataatgacgtatgttcccatagtaacgccaatagggactttccattgacgtcaatgggtggagtatttacggtaaactgcccacttggcagtacatcaagtgtatcatatgccaagtacgccccctattgacgtcaatgacggtaaatggcccgcctggcattatgcccagtacatgaccttatgggactttcctacttggcagtacatctacgtattagtcatcgctattaccatggtcgaggtgagccccacgttctgcttcactctccccatctcccccccctccccacccccaattttgtatttatttattttttaattattttgtgcagcgatgggggcggggggggggggggggcgcgcgccaggcggggcggggcggggcgaggggcggggcggggcgaggcggagaggtgcggcggcagccaatcagagcggcgcgctccgaaagtttccttttatggcgaggcggcggcggcggcggccctataaaaagcgaagcgcgcggcgggcgggagtcgctgcgcgctgccttcgccccgtgccccgctccgccgccgcctcgcgccgcccgccccggctctgactgaccgcgttactcccacaggtgagcgggcgggacggcccttctcctccgggctgtaattagcgcttggtttaatgacggcttgtttcttttctgtggctgcgtgaaagccttgaggggctccgggagggccctttgtgcggggggagcggctcggggggtgcgtgcgtgtgtgtgtgcgtggggagcgccgcgtgcggctccgcgctgcccggcggctgtgagcgctgcgggcgcggcgcggggctttgtgcgctccgcagtgtgcgcgaggggagcgcggccgggggcggtgccccgcggtgcggggggggctgcgaggggaacaaaggctgcgtgcggggtgtgtgcgtgggggggtgagcagggggtgtgggcgcgtcggtcgggctgcaaccccccctgcacccccctccccgagttgctgagcacggcccggcttcgggtgcggggctccgtacggggcgtggcgcggggctcgccgtgccgggcggggggtggcggcaggtgggggtgccgggcggggcggggccgcctcgggccggggagggctcgggggaggggcgcggcggcccccggagcgccggcggctgtcgaggcgcggcgagccgcagccattgccttttatggtaatcgtgcgagagggcgcagggacttcctttgtcccaaatctgtgcggagccgaaatctgggaggcgccgccgcaccccctctagcgggcgcggggcgaagcggtgcggcgccggcaggaaggaaatgggcggggagggccttcgtgcgtcgccgcgccgccgtccccttctccctctccagcctcggggctgtccgcggggggacggctgccttcgggggggacggggcagggcggggttcggcttctggcgtgtgaccggcggctctagagcctctgctaaccatgttcatgccttcttctttttcctacagctcctgggcaacgtgctggttattgtgctgtctcatcattttggcaaag

SEQ ID NO: 412 - DNA, 723 bp, Artificial Sequence
  synthetic construct; promoter sequence
aggctcagaggcacacaggagtttctgggctcaccctgcccccttccaacccctcagttcccatcctccagcagctgtttgtgtgctgcctctgaagtccacactgaacaaacttcagcctactcatgtccctaaaatgggcaaacattgcaagcagcaaacagcaaacacacagccctccctgcctgctgaccttggagctggggcagaggtcagagacctctctgggcccatgccacctccaacatccactcgaccccttggaatttcggtggagaggagcagaggttgtcctggcgtggtttaggtagtgtgagaggggtacccggggatcttgctaccagtggaacagccactaaggattctgcagtgagagcagagggccagctaagtggtactctcccagagactgtctgactcacgccaccccctccaccttggacacaggacgctgtggtttctgagccaggtacaatgactcctttcggtaagtgcagtggaagctgtacactgcccaggcaaagcgtccgggcagcgtaggcgggcgactcagatcccagccagtggacttagcccctgtttgctcctccgataactggggtgaccttggttaatattcaccagcagcctcccccgttgcccctctggatccactgcttaaatacggacgaggacagggccctgtctcctcagcttcaggcaccaccactgacctgggacagt

SEQ ID NO: 413 - DNA, 865 bp, Artificial Sequence
  synthetic construct; promoter sequence
ccactacgggtttaggctgcccatgtaaggaggcaaggcctggggacacccgagatgcctggttataattaacccagacatgtggctgccccccccccccccaacacctgctgcctctaaaaataaccctgtccctggtggatcccactacgggtttaggctgcccatgtaaggaggcaaggcctggggacacccgagatgcctggttataattaacccagacatgtggctgccccccccccccccaacacctgctgcctctaaaaataaccctgtccctggtggatcccactacgggtttaggctgcccatgtaaggaggcaaggcctggggacacccgagatgcctggttataattaacccagacatgtggctgccccccccccccccaacacctgctgcctctaaaaataaccctgtccctggtggatcccctgcatgcgaagatcttcgaacaaggctgtgggggactgagggcaggctgtaacaggcttgggggccagggcttatacgtgcctgggactcccaaagtattactgttccatgttcccggcgaagggccagctgtcccccgccagctagactcagcacttagtttaggaaccagtgagcaagtcagcccttggggcagcccatacaaggccatggggctgggcaagctgcacgcctgggtccggggtgggcacggtgcccgggcaacgagctgaaagctcatctgctctcaggggcccctccctggggacagcccctcctggctagtcacaccctgtaggctcctctatataacccaggggcacaggggctgccctcattctaccaccacctccacagcacagacagacactcaggagccagccagcgtcga

SEQ ID NO: 414 - DNA, 251 bp, Artificial Sequence
  synthetic construct; promoter sequence
atggaggcggtactatgtagatgagaattcaggagcaaactgggaaaagcaactgcttccaaatatttgtgatttttacagtgtagttttggaaaaactcttagcctaccaattcttctaagtgttttaaaatgtgggagccagtacacatgaagttatagagtgttttaatgaggcttaaatatttaccgtaactatgaaatgctacgcatatcatgctgttcaggctccgtggccacgcaactcatact

SEQ ID NO: 415 - DNA, 212 bp, Artificial Sequence
  synthetic construct; promoter sequence
gggcagagcgcacatcgcccacagtccccgagaagttggggggaggggtcggcaattgaacgggtgcctagagaaggtggcgcggggtaaactgggaaagtgatgtcgtgtactggctccgcctttttcccgagggtgggggagaaccgtatataagtgcagtagtcgccgtgaacgttctttttcgcaacgggtttgccgccagaacacag

SEQ ID NO: 416 - DNA, 133 bp, Artificial Sequence
  synthetic construct; promoter sequence
gtaagtatcaaggttacaagacaggtttaaggagaccaatagaaactgggcttgtcgagacagagaagactcttgcgtttctgataggcacctattggtcttactgacatccactttgcctttctctccacag

SEQ ID NO: 417 - DNA, 82 bp, Artificial Sequence
  synthetic construct; intron
gtgagtatctcagggatccagacatggggatatgggaggtgcctctgatcccagggctcactgtgggtctctctgttcacag

SEQ ID NO: 418 - DNA, 130 bp, Artificial Sequence
  synthetic construct regulatory element
ctgcgcgctcgctcgctcactgaggccgcccgggcaaagcccgggcgtcgggcgacctttggtcgcccggcctcagtgagcgagcgagcgcgcagagagggagtggccaactccatcactaggggttcct

SEQ ID NO: 419 - DNA, 106 bp, Artificial Sequence
  synthetic construct regulatory element
ctgcgcgctcgctcgctcactgaggccgcccgggcaaagcccgggcgtcgggcgacctttggtcgcccggcctcagtgagcgagcgagcgcgcagagagggagtgg

SEQ ID NO: 420 - DNA, 143 bp, Artificial Sequence
  synthetic construct regulatory element
gaacccctagtgatggagttggccactccctctctgcgcgctcgctcgctcactgaggccgcccgggcaaagcccgggcgtcgggcgacctttggtcgcccggcctcagtgagcgagcgagcgcgcagagagggagtggccaa

SEQ ID NO: 421 - DNA, 110 bp, Artificial Sequence
  synthetic construct; regulatory element
ttggccactccctctctgcgcgctcgctcgctcactgaggccgggcgaccaaaggtcgcccgacgcccgggctttgcccgggcggcctcagtgagcgagcgagcgcgcag

SEQ ID NO: 422 - DNA, 60 bp, Artificial Sequence
  synthetic construct; regulatory element
atgtataggatgcaactgctcctcctgattgctctgagcctggctcttgtgaccaactct

SEQ ID NO: 423 - DNA, 460 bp, Artificial Sequence
  synthetic construct; regulatory element
gggctggaagctacctttgacatcatttcctctgcgaatgcatgtataatttctacagaacctattagaaaggatcacccagcctctgcttttgtacaactttcccttaaaaaactgccaattccactgctgtttggcccaatagtgagaactttttcctgctgcctcttggtgcttttgcctatggcccctattctgcctgctgaagacactcttgccagcatggacttaaacccctccagctctgacaatcctctttctcttttgttttacatgaagggtctggcagccaaagcaatcactcaaagttcaaaccttatcattttttgctttgttcctcttggccttggttttgtacatcagctttgaaaataccatcccagggttaatgctggggttaatttataactaagagtgctctagttttgcaatacaggacatgctataaaaatggaaagat

SEQ ID NO: 424 - DNA, 75 bp, Artificial Sequence
  synthetic construct; linker
agaaagagaagaggctctggagaaggcagaggctccctgctgacatgtggggatgttgaagagaatcctgggcct

SEQ ID NO: 425 - DNA, 12 bp, Artificial Sequence
  synthetic construct; linker
agaaagagaaga

SEQ ID NO: 426 - DNA, 21 bp, Artificial Sequence
  synthetic construct; linker
agaaagagaagaggctctgga

SEQ ID NO: 427 - DNA, 9 bp, Artificial Sequence
  synthetic construct; linker
ggctctgga

SEQ ID NO: 428 - DNA, 54 bp, Artificial Sequence
  synthetic construct; linker
gaaggcagaggctccctgctgacatgtggggatgttgaagagaatcctgggcct

SEQ ID NO: 429 - protein, 25 aa, Artificial Sequence
  synthetic construct; linker
  SITE (5)..(7): This region may be absent in its entirety
RKRRGSGEGRGSLLTCGDVEENPGP

SEQ ID NO: 430 - protein, 5 aa, Artificial Sequence
  synthetic construct; antibody fragment
CPPCA

SEQ ID NO: 431 - protein, 19 aa, Artificial Sequence
  synthetic construct; antibody fragment
ESKYGPPCPPCPAPEAAGG

SEQ ID NO: 432 - protein, 19 aa, Artificial Sequence
  synthetic construct; antibody fragment
ESKYGPPCPSCPAPEAAGG

SEQ ID NO: 433 - protein, 18 aa, Artificial Sequence
  synthetic construct; antibody fragment
ERKSCVECPPCPAPPVAG

SEQ ID NO: 434 - protein, 13 aa, Artificial Sequence
  synthetic construct; antibody fragment
ERKSCVECPPCPA

SEQ ID NO: 435 - DNA, 4196 bp, Artificial Sequence
  synthetic construct; antibody fragment
ctagtcgacattgattattgactagttattaatagtaatcaattacggggtcattagttcatagcccatatatggagttccgcgttacataacttacggtaaatggcccgcctggctgaccgcccaacgacccccgcccattgacgtcaataatgacgtatgttcccatagtaacgccaatagggactttccattgacgtcaatgggtggagtatttacggtaaactgcccacttggcagtacatcaagtgtatcatatgccaagtacgccccctattgacgtcaatgacggtaaatggcccgcctggcattatgcccagtacatgaccttatgggactttcctacttggcagtacatctacgtattagtcatcgctattaccatggtcgaggtgagccccacgttctgcttcactctccccatctcccccccctccccacccccaattttgtatttatttattttttaattattttgtgcagcgatgggggcggggggggggggggggcgcgcgccaggcggggcggggcggggcgaggggcggggcggggcgaggcggagaggtgcggcggcagccaatcagagcggcgcgctccgaaagtttccttttatggcgaggcggcggcggcggcggccctataaaaagcgaagcgcgcggcgggcgggagtcgctgcgcgctgccttcgccccgtgccccgctccgccgccgcctcgcgccgcccgccccggctctgactgaccgcgttactcccacaggtgagcgggcgggacggcccttctcctccgggctgtaattagcgcttggtttaatgacggcttgtttcttttctgtggctgcgtgaaagccttgaggggctccgggagggccctttgtgcggggggagcggctcggggggtgcgtgcgtgtgtgtgtgcgtggggagcgccgcgtgcggctccgcgctgcccggcggctgtgagcgctgcgggcgcggcgcggggctttgtgcgctccgcagtgtgcgcgaggggagcgcggccgggggcggtgccccgcggtgcggggggggctgcgaggggaacaaaggctgcgtgcggggtgtgtgcgtgggggggtgagcagggggtgtgggcgcgtcggtcgggctgcaaccccccctgcacccccctccccgagttgctgagcacggcccggcttcgggtgcggggctccgtacggggcgtggcgcggggctcgccgtgccgggcggggggtggcggcaggtgggggtgccgggcggggcggggccgcctcgggccggggagggctcgggggaggggcgcggcggcccccggagcgccggcggctgtcgaggcgcggcgagccgcagccattgccttttatggtaatcgtgcgagagggcgcagggacttcctttgtcccaaatctgtgcggagccgaaatctgggaggcgccgccgcaccccctctagcgggcgcggggcgaagcggtgcggcgccggcaggaaggaaatgggcggggagggccttcgtgcgtcgccgcgccgccgtccccttctccctctccagcctcggggctgtccgcggggggacggctgccttcgggggggacggggcagggcggggttcggcttctggcgtgtgaccggcggctctagagcctctgctaaccatgttcatgccttcttctttttcctacagctcctgggcaacgtgctggttattgtgctgtctcatcattttggcaaagaattcgctagcgggcactttgcactggaacttacaacacccgagcaaggacgcgactctccaccatgtaccggatgcagctgctgctgctcattgccctgtctctggccctggtcaccaatagcgaagtccagctgctggaatctggcggcggacttgttcaacctggcggctctctgagactgagctgtgccgcttccggcttcaccttcagccactatatcatgatgtgggtccgacaggcccctggcaaaggccttgaatgggtgtccggcatctatagcagcggcggcatcacagtgtacgccgactctgtgaagggcagattcaccatcagccgggacaacagcaagaacaccctgtacctgcagatgaacagcctgagagccgaggacaccgccgtgtactactgcgcctatagaagaatcggcgtgcccagacgggacgagttcgatatttggggccagggcaccatggtcaccgtgtctagcgcctctacaaagggccctagcgtgttccctctggctcctagcagcaagagcacaagcggaggaacagccgctctgggctgtctggtcaaggactactttcccgagcctgtgaccgtgtcctggaatagcggagcactgacaagcggcgtgcacacctttccagctgtgctgcaaagcagcggcctgtactctctgagcagcgtggtcacagtgccaagctctagcctgggcacccagacctacatctgcaatgtgaaccacaagcctagcaacaccaaggtggacaagagagtggaacccaagagctgcgacaagacccacacctgtcctccatgtcctgctccagaactgctcggcggaccttccgtgttcctgtttcctccaaagcctaaggacaccctgatgatcagcagaacccctgaagtgacctgcgtggtggtggatgtgtcccacgaggatcccgaagtgaagttcaattggtacgtggacggcgtggaagtgcacaacgccaagaccaagcctagagaggaacagtacaacagcacctacagagtggtgtccgtgctgaccgtgctgcaccaggattggctgaacggcaaagagtacaagtgcaaggtgtccaacaaggccctgcctgctcctatcgagaaaaccatcagcaaggccaagggccagcctagggaaccccaggtttacacactgcctccaagccgggaagagatgaccaagaaccaggtgtccctgacctgcctcgtgaagggcttctacccttccgatatcgccgtggaatgggagagcaatggccagccagagaacaactacaagacaacccctcctgtgctggacagcgacggctcattcttcctgtacagcaagctgacagtggacaagtccagatggcagcagggcaacgtgttcagctgcagcgtgatgcacgaggccctgcacaaccactacacccagaagagtctgagcctgtctccaggcctgcggaagagaagggctcctgtgaagcagaccctgaacttcgacctgctgaaactggccggcgacgtggaaagcaaccccggacctatgtatagaatgcagctcctcctgctgatcgcactgagcctggctctcgtgaccaacagcgacatccagatgacacagagccccagcacactgtctgccagcgtgggagacagagtgaccatcacctgtagagccagccagtccatctcctcttggctggcctggtatcagcaaaagcctggcaaggcccctaagctgctgatctacaaggcctccacactggaaagcggggtgccctccagattttctggcagcggatctggcaccgagttcaccctgaccatcagtagcctgcagcctgacgacttcgccacctactactgccagcagtacaatacctactggaccttcggccagggaacaaaggtggaaatcaagcggactgtggccgctccaagcgtgttcatctttccacctagcgacgagcagctgaagtccggcacagcctctgttgtgtgcctgctgaacaacttctaccccagagaagccaaggtgcagtggaaagtggacaatgccctgcagagcggcaactcccaagagagcgtgacagagcaggactccaaggattccacctacagcctgtctagcaccctgacactgagcaaggccgactacgagaagcacaaagtgtatgcctgcgaagtgacccaccagggccttagctctccagtgaccaagagcttcaaccggggcgagtgttgataaagcggccgcggtacctctagagtcgacccgggcggcctcgaggacggggtgaactacgcctgaggatccgatctttttccctctgccaaaaattatggggacatcatgaagccccttgagcatctgacttctggctaataaaggaaatttattttcattgcaatagtgtgttggaattttttgtgtctctcactcg

SEQ ID NO: 436 - DNA, 4106 bp, Artificial Sequence
  synthetic construct; antibody fragment
gacattgattattgactagttattaatagtaatcaattacggggtcattagttcatagcccatatatggagttccgcgttacataacttacggtaaatggcccgcctggctgaccgcccaacgacccccgcccattgacgtcaataatgacgtatgttcccatagtaacgccaatagggactttccattgacgtcaatgggtggagtatttacggtaaactgcccacttggcagtacatcaagtgtatcatatgccaagtacgccccctattgacgtcaatgacggtaaatggcccgcctggcattatgcccagtacatgaccttatgggactttcctacttggcagtacatctacgtattagtcatcgctattaccatggtcgaggtgagccccacgttctgcttcactctccccatctcccccccctccccacccccaattttgtatttatttattttttaattattttgtgcagcgatgggggcggggggggggggggggcgcgcgccaggcggggcggggcggggcgaggggcggggcggggcgaggcggagaggtgcggcggcagccaatcagagcggcgcgctccgaaagtttccttttatggcgaggcggcggcggcggcggccctataaaaagcgaagcgcgcggcgggcgggagtcgctgcgcgctgccttcgccccgtgccccgctccgccgccgcctcgcgccgcccgccccggctctgactgaccgcgttactcccacaggtgagcgggcgggacggcccttctcctccgggctgtaattagcgcttggtttaatgacggcttgtttcttttctgtggctgcgtgaaagccttgaggggctccgggagggccctttgtgcggggggagcggctcggggggtgcgtgcgtgtgtgtgtgcgtggggagcgccgcgtgcggctccgcgctgcccggcggctgtgagcgctgcgggcgcggcgcggggctttgtgcgctccgcagtgtgcgcgaggggagcgcggccgggggcggtgccccgcggtgcggggggggctgcgaggggaacaaaggctgcgtgcggggtgtgtgcgtgggggggtgagcagggggtgtgggcgcgtcggtcgggctgcaaccccccctgcacccccctccccgagttgctgagcacggcccggcttcgggtgcggggctccgtacggggcgtggcgcggggctcgccgtgccgggcggggggtggcggcaggtgggggtgccgggcggggcggggccgcctcgggccggggagggctcgggggaggggcgcggcggcccccggagcgccggcggctgtcgaggcgcggcgagccgcagccattgccttttatggtaatcgtgcgagagggcgcagggacttcctttgtcccaaatctgtgcggagccgaaatctgggaggcgccgccgcaccccctctagcgggcgcggggcgaagcggtgcggcgccggcaggaaggaaatgggcggggagggccttcgtgcgtcgccgcgccgccgtccccttctccctctccagcctcggggctgtccgcggggggacggctgccttcgggggggacggggcagggcggggttcggcttctggcgtgtgaccggcggctctagagcctctgctaaccatgttcatgccttcttctttttcctacagctcctgggcaacgtgctggttattgtgctgtctcatcattttggcaaagaattcgccgccaccatgtacagaatgcagctgctgctgctcattgccctgtctctggccctggtcaccaattctgaggtccagctgcttgagagtggtggtggactggttcagcctggtggcagcctgagactgtcttgtgctgcctctggcttcaccttcagccactatatcatgatgtgggtcagacaggcccctggcaaaggcctggaatgggtgtcaggcatctacagcagtggtggcatcacagtgtatgctgactctgtgaagggcagattcaccatcagcagagacaacagcaagaacaccctgtacctgcagatgaactccctgagagctgaggacacagcagtgtactactgtgcctatagaagaattggggtgcccagaagggatgagtttgacatctggggccagggcaccatggttacagtgtcctctgccagcacaaagggcccctctgtttttccactggctcccagcagcaagagcaccagtggtggaacagctgccctgggctgtctggtcaaggattacttccctgagcctgtgactgtgtcctggaactctggggctctgacctctggggtgcacacctttccagctgtgctgcagtcctctggcctgtactctctgtcctctgtggtcacagtgcctagctctagcctgggcacacagacctacatctgcaatgtgaaccacaagcctagcaacaccaaggtggacaagagagtggaacccaagagctgtgacaagacccacacctgtcctccatgtcctgctccagaactgcttggaggcccttctgtgttcctgtttcctccaaagcctaaggacaccctgatgatcagcagaacccctgaagtgacctgtgtggtggttgatgtgtcccatgaggacccagaagtgaagttcaattggtatgtggatggggttgaagtgcacaatgccaagaccaagcctagagaggaacagtacaacagcacctacagagtggtttctgtgctgacagtgctgcaccaggactggctgaatggcaaagagtacaagtgcaaggtgtccaacaaggccctgcctgctcctattgagaaaaccatctccaaggccaagggccagccaagagaaccccaggtttacaccctgccacctagcagagaagagatgaccaagaaccaggtgtccctgacctgcctggttaagggcttctacccctctgacattgctgtggaatgggagagcaatggccagcctgaaaacaactacaagacaacccctcctgtgctggactctgatggctcattcttcctgtacagcaagctgactgtggacaagtccagatggcagcagggaaatgtgttcagctgctctgtgatgcatgaggccctgcacaaccactacacccagaaaagtctgtctctgtcccctggcagaaagagaagaggatcaggggccccagtgaagcagaccctgaactttgatctgctgaagctggctggggatgttgagagcaaccctggacctatgtataggatgcaactgctcctcctgattgctctgagcctggctcttgtgaccaactctgacatccagatgacacagagcccctccacactgtctgcatctgtgggagacagagtgaccatcacctgtagagccagccagtctatctcttcctggctggcctggtatcagcaaaagcctggcaaggcccctaagctgctgatctacaaggccagcacacttgagtcaggggtgccctccagattttctggctctggatctggcacagagttcaccctgaccatcagctccctgcagccagatgactttgccacctactactgccagcagtacaatacctactggacctttggccagggaacaaaggtggaaatcaagagaacagtggctgccccatctgtgttcatcttcccaccatctgatgaacagctgaagtctggcactgcctctgttgtgtgcctgctgaacaacttttaccctagagaagccaaggtgcagtggaaagtggataatgccctgcagtctggcaatagccaagaatctgtgacagagcaggactccaaggattccacctacagcctgagcagcaccctgacactgagcaaggctgactatgagaagcacaaagtgtatgcctgtgaagtgacacaccagggactgagcagcccagtgaccaagagcttcaacaggggagagtgctgataactcgaggacggggtgaactacgcctgaggatccgatctttttccctctgccaaaaattatggggacatcatgaagccccttgagcatctgacttctggctaataaaggaaatttattttcattgcaatagtgtgttggaattttttgtgtctctca

SEQ ID NO: 437 - DNA, 4092 bp, Artificial Sequence
  synthetic construct; antibody fragment
gacattgattattgactagttattaatagtaatcaattacggggtcattagttcatagcccatatatggagttccgcgttacataacttacggtaaatggcccgcctggctgaccgcccaacgacccccgcccattgacgtcaataatgacgtatgttcccatagtaacgccaatagggactttccattgacgtcaatgggtggagtatttacggtaaactgcccacttggcagtacatcaagtgtatcatatgccaagtacgccccctattgacgtcaatgacggtaaatggcccgcctggcattatgcccagtacatgaccttatgggactttcctacttggcagtacatctacgtattagtcatcgctattaccatggtcgaggtgagccccacgttctgcttcactctccccatctcccccccctccccacccccaattttgtatttatttattttttaattattttgtgcagcgatgggggcggggggggggggggggcgcgcgccaggcggggcggggcggggcgaggggcggggcggggcgaggcggagaggtgcggcggcagccaatcagagcggcgcgctccgaaagtttccttttatggcgaggcggcggcggcggcggccctataaaaagcgaagcgcgcggcgggcgggagtcgctgcgcgctgccttcgccccgtgccccgctccgccgccgcctcgcgccgcccgccccggctctgactgaccgcgttactcccacaggtgagcgggcgggacggcccttctcctccgggctgtaattagcgcttggtttaatgacggcttgtttcttttctgtggctgcgtgaaagccttgaggggctccgggagggccctttgtgcggggggagcggctcggggggtgcgtgcgtgtgtgtgtgcgtggggagcgccgcgtgcggctccgcgctgcccggcggctgtgagcgctgcgggcgcggcgcggggctttgtgcgctccgcagtgtgcgcgaggggagcgcggccgggggcggtgccccgcggtgcggggggggctgcgaggggaacaaaggctgcgtgcggggtgtgtgcgtgggggggtgagcagggggtgtgggcgcgtcggtcgggctgcaaccccccctgcacccccctccccgagttgctgagcacggcccggcttcgggtgcggggctccgtacggggcgtggcgcggggctcgccgtgccgggcggggggtggcggcaggtgggggtgccgggcggggcggggccgcctcgggccggggagggctcgggggaggggcgcggcggcccccggagcgccggcggctgtcgaggcgcggcgagccgcagccattgccttttatggtaatcgtgcgagagggcgcagggacttcctttgtcccaaatctgtgcggagccgaaatctgggaggcgccgccgcaccccctctagcgggcgcggggcgaagcggtgcggcgccggcaggaaggaaatgggcggggagggccttcgtgcgtcgccgcgccgccgtccccttctccctctccagcctcggggctgtccgcggggggacggctgccttcgggggggacggggcagggcggggttcggcttctggcgtgtgaccggcggctctagagcctctgctaaccatgttcatgccttcttctttttcctacagctcctgggcaacgtgctggttattgtgctgtctcatcattttggcaaagaattcgccgccaccatgtacagaatgcagctgctgctgctcattgccctgtctctggccctggtcaccaattctgaggtccagctgcttgagagtggtggtggactggttcagcctggtggcagcctgagactgtcttgtgctgcctctggcttcaccttcagccactatatcatgatgtgggtcagacaggcccctggcaaaggcctggaatgggtgtcaggcatctacagcagtggtggcatcacagtgtatgctgactctgtgaagggcagattcaccatcagcagagacaacagcaagaacaccctgtacctgcagatgaactccctgagagctgaggacacagcagtgtactactgtgcctatagaagaattggggtgcccagaagggatgagtttgacatctggggccagggcaccatggttacagtgtcctctgccagcacaaagggcccctctgtttttccactggctcccagcagcaagagcaccagtggtggaacagctgccctgggctgtctggtcaaggattacttccctgagcctgtgactgtgtcctggaactctggggctctgacttctggggtgcacacctttccagctgtgctgcagtcctctggcctgtactctctgtcctctgtggtcacagtgcctagctctagcctgggcacacagacctacatctgcaatgtgaaccacaagcctagcaacaccaaggtggacaagagagtggaacccaagagctgtgacaagacccacacctgtcctccatgtcctgctccagaactgcttggaggcccttctgtgttcctgtttcctccaaagcctaaggacaccctgatgatcagcagaacccctgaagtgacctgtgtggtggttgatgtgtcccatgaggacccagaagtgaagttcaattggtatgtggatggggttgaagtgcacaatgccaagaccaagcctagagaggaacagtacaacagcacctacagagtggtttctgtgctgacagtgctgcaccaggactggctgaatggcaaagagtacaagtgcaaggtgtccaacaaggccctgcctgctcctattgagaaaaccatctccaaggccaagggccagccaagagaaccccaggtttacaccctgccacctagcagagaagagatgaccaagaaccaggtgtccctgacctgcctggttaagggcttctacccctctgacattgctgtggaatgggagagcaatggccagcctgaaaacaactacaagacaacccctcctgtgctggactctgatggctcattcttcctgtacagcaagctgactgtggacaagtccagatggcagcagggaaatgtgttcagctgctctgtgatgcatgaggccctgcacaaccactacacccagaaaagtctgtctctgtcccctggcagaaagagaagaggctctggagaaggcagaggctccctgctgacatgtggggatgttgaagagaatcctgggcctatgtataggatgcaactgctcctcctgattgctctgagcctggctcttgtgaccaactctgacatccagatgacacagagcccctccacactgtctgcatctgtgggagacagagtgaccatcacctgtagagccagccagtctatctctagctggctggcctggtatcagcaaaagcctggcaaggcccctaagctgctgatctacaaggccagcacacttgagtcaggggtgccctccagattttctggctctggatctggcacagagttcaccctgaccatcagctccctgcagccagatgactttgccacctactactgccagcagtacaatacctactggacctttggccagggaacaaaggtggaaatcaagagaacagtggctgccccatctgtgttcatcttcccaccatctgatgaacagctgaagtctggcactgcctctgttgtgtgcctgctgaacaacttttaccccagagaagccaaggtgcagtggaaagtggataatgccctgcagtctggcaatagccaagaatctgtgacagagcaggactccaaggattccacctacagcctgagcagcaccctgacactgagcaaggctgactatgagaagcacaaagtgtatgcctgtgaagtgacacaccagggactgagcagcccagtgaccaagagcttcaacaggggagagtgctgataactcgaggacggggtgaactacgcctgaggatccgatctttttccctctgccaaaaattatggggacatcatgaagccccttgagcatctgacttctggctaataaaggaaatttattttcattgcaatagtgtgttggaattttttgtgtctctcactcg

SEQ ID NO: 438 - DNA, 3397 bp, Artificial Sequence
  synthetic construct; antibody fragment
aggttaatttttaaaaagcagtcaaaagtccaagtggcccttggcagcatttactctctctgtttgctctggttaataatctcaggagcacaaacattccagatccaggttaatttttaaaaagcagtcaaaagtccaagtggcccttggcagcatttactctctctgtttgctctggttaataatctcaggagcacaaacattccagatccggcgcgccagggctggaagctacctttgacatcatttcctctgcgaatgcatgtataatttctacagaacctattagaaaggatcacccagcctctgcttttgtacaactttcccttaaaaaactgccaattccactgctgtttggcccaatagtgagaactttttcctgctgcctcttggtgcttttgcctatggcccctattctgcctgctgaagacactcttgccagcatggacttaaacccctccagctctgacaatcctctttctcttttgttttacatgaagggtctggcagccaaagcaatcactcaaagttcaaaccttatcattttttgctttgttcctcttggccttggttttgtacatcagctttgaaaataccatcccagggttaatgctggggttaatttataactaagagtgctctagttttgcaatacaggacatgctataaaaatggaaagatgttgctttctgagagacagctttattgcggtagtttatcacagttaaattgctaacgcagtcagtgcttctgacacaacagtctcgaacttaagctgcagaagttggtcgtgaggcactgggcaggtaagtatcaaggttacaagacaggtttaaggagaccaatagaaactgggcttgtcgagacagagaagactcttgcgtttctgataggcacctattggtcttactgacatccactttgcctttctctccacaggtgtccactcccagttcaattacagctcttaaggctagagtacttaatacgactcactataggctagcctcgagaattcacgcgtgccgccaccatgtacagaatgcagctgctgctgctcattgccctgtctctggccctggtcaccaattctgaggtccagctgcttgagagtggtggtggactggttcagcctggtggcagcctgagactgtcttgtgctgcctctggcttcaccttcagccactatatcatgatgtgggtcagacaggcccctggcaaaggcctggaatgggtgtcaggcatctacagcagtggtggcatcacagtgtatgctgactctgtgaagggcagattcaccatcagcagagacaacagcaagaacaccctgtacctgcagatgaactccctgagagctgaggacacagcagtgtactactgtgcctatagaagaattggggtgcccagaagggatgagtttgacatctggggccagggcaccatggttacagtgtcctctgccagcacaaagggcccctctgtttttccactggctcccagcagcaagagcaccagtggtggaacagctgccctgggctgtctggtcaaggattacttccctgagcctgtgactgtgtcctggaactctggggctctgacttctggggtgcacacctttccagctgtgctgcagtcctctggcctgtactctctgtcctctgtggtcacagtgcctagctctagcctgggcacacagacctacatctgcaatgtgaaccacaagcctagcaacaccaaggtggacaagagagtggaacccaagagctgtgacaagacccacacctgtcctccatgtcctgctccagaactgcttggaggcccttctgtgttcctgtttcctccaaagcctaaggacaccctgatgatcagcagaacccctgaagtgacctgtgtggtggttgatgtgtcccatgaggacccagaagtgaagttcaattggtatgtggatggggttgaagtgcacaatgccaagaccaagcctagagaggaacagtacaacagcacctacagagtggtttctgtgctgacagtgctgcaccaggactggctgaatggcaaagagtacaagtgcaaggtgtccaacaaggccctgcctgctcctattgagaaaaccatctccaaggccaagggccagccaagagaaccccaggtttacaccctgccacctagcagagaagagatgaccaagaaccaggtgtccctgacctgcctggttaagggcttctacccctctgacattgctgtggaatgggagagcaatggccagcctgaaaacaactacaagacaacccctcctgtgctggactctgatggctcattcttcctgtacagcaagctgactgtggacaagtccagatggcagcagggaaatgtgttcagctgctctgtgatgcatgaggccctgcacaaccactacacccagaaaagtctgtctctgtcccctggcagaaagagaagaggctctggagaaggcagaggctccctgctgacatgtggggatgttgaagagaatcctgggcctatgtataggatgcaactgctcctcctgattgctctgagcctggctcttgtgaccaactctgacatccagatgacacagagcccctccacactgtctgcatctgtgggagacagagtgaccatcacctgtagagccagccagtctatctctagctggctggcctggtatcagcaaaagcctggcaaggcccctaagctgctgatctacaaggccagcacacttgagtcaggggtgccctccagattttctggctctggatctggcacagagttcaccctgaccatcagctccctgcagccagatgactttgccacctactactgccagcagtacaatacctactggacctttggccagggaacaaaggtggaaatcaagagaacagtggctgccccatctgtgttcatcttcccaccatctgatgaacagctgaagtctggcactgcctctgttgtgtgcctgctgaacaacttttaccccagagaagccaaggtgcagtggaaagtggataatgccctgcagtctggcaatagccaagaatctgtgacagagcaggactccaaggattccacctacagcctgagcagcaccctgacactgagcaaggctgactatgagaagcacaaagtgtatgcctgtgaagtgacacaccagggactgagcagcccagtgaccaagagcttcaacaggggagagtgctgataagtcgacccgggcggcctcgaggacggggtgaactacgcctgaggatccgatctttttccctctgccaaaaattatggggacatcatgaagccccttgagcatctgacttctggctaataaaggaaatttattttcattgcaatagtgtgttggaattttttgtgtctctca

SEQ ID NO: 439 - DNA, 3227 bp, Artificial Sequence
  synthetic construct; antibody fragment
aggctcagaggcacacaggagtttctgggctcaccctgcccccttccaacccctcagttcccatcctccagcagctgtttgtgtgctgcctctgaagtccacactgaacaaacttcagcctactcatgtccctaaaatgggcaaacattgcaagcagcaaacagcaaacacacagccctccctgcctgctgaccttggagctggggcagaggtcagagacctctctgggcccatgccacctccaacatccactcgaccccttggaatttcggtggagaggagcagaggttgtcctggcgtggtttaggtagtgtgagaggggtacccggggatcttgctaccagtggaacagccactaaggattctgcagtgagagcagagggccagctaagtggtactctcccagagactgtctgactcacgccaccccctccaccttggacacaggacgctgtggtttctgagccaggtacaatgactcctttcggtaagtgcagtggaagctgtacactgcccaggcaaagcgtccgggcagcgtaggcgggcgactcagatcccagccagtggacttagcccctgtttgctcctccgataactggggtgaccttggttaatattcaccagcagcctcccccgttgcccctctggatccactgcttaaatacggacgaggacagggccctgtctcctcagcttcaggcaccaccactgacctgggacagtcaggtaagtatcaaggttacaagacaggtttaaggagaccaatagaaactgggcttgtcgagacagagaagactcttgcgtttctgataggcacctattggtcttactgacatccactttgcctttctctccacaggttcgaattcgccgccaccatgtacagaatgcagctgctgctgctcattgccctgtctctggccctggtcaccaattctgaggtccagctgcttgagagtggtggtggactggttcagcctggtggcagcctgagactgtcttgtgctgcctctggcttcaccttcagccactatatcatgatgtgggtcagacaggcccctggcaaaggcctggaatgggtgtcaggcatctacagcagtggtggcatcacagtgtatgctgactctgtgaagggcagattcaccatcagcagagacaacagcaagaacaccctgtacctgcagatgaactccctgagagctgaggacacagcagtgtactactgtgcctatagaagaattggggtgcccagaagggatgagtttgacatctggggccagggcaccatggttacagtgtcctctgccagcacaaagggcccctctgtttttccactggctcccagcagcaagagcaccagtggtggaacagctgccctgggctgtctggtcaaggattacttccctgagcctgtgactgtgtcctggaactctggggctctgacttctggggtgcacacctttccagctgtgctgcagtcctctggcctgtactctctgtcctctgtggtcacagtgcctagctctagcctgggcacacagacctacatctgcaatgtgaaccacaagcctagcaacaccaaggtggacaagagagtggaacccaagagctgtgacaagacccacacctgtcctccatgtcctgctccagaactgcttggaggcccttctgtgttcctgtttcctccaaagcctaaggacaccctgatgatcagcagaacccctgaagtgacctgtgtggtggttgatgtgtcccatgaggacccagaagtgaagttcaattggtatgtggatggggttgaagtgcacaatgccaagaccaagcctagagaggaacagtacaacagcacctacagagtggtttctgtgctgacagtgctgcaccaggactggctgaatggcaaagagtacaagtgcaaggtgtccaacaaggccctgcctgctcctattgagaaaaccatctccaaggccaagggccagccaagagaaccccaggtttacaccctgccacctagcagagaagagatgaccaagaaccaggtgtccctgacctgcctggttaagggcttctacccctctgacattgctgtggaatgggagagcaatggccagcctgaaaacaactacaagacaacccctcctgtgctggactctgatggctcattcttcctgtacagcaagctgactgtggacaagtccagatggcagcagggaaatgtgttcagctgctctgtgatgcatgaggccctgcacaaccactacacccagaaaagtctgtctctgtcccctggcagaaagagaagaggctctggagaaggcagaggctccctgctgacatgtggggatgttgaagagaatcctgggcctatgtataggatgcaactgctcctcctgattgctctgagcctggctcttgtgaccaactctgacatccagatgacacagagcccctccacactgtctgcatctgtgggagacagagtgaccatcacctgtagagccagccagtctatctctagctggctggcctggtatcagcaaaagcctggcaaggcccctaagctgctgatctacaaggccagcacacttgagtcaggggtgccctccagattttctggctctggatctggcacagagttcaccctgaccatcagctccctgcagccagatgactttgccacctactactgccagcagtacaatacctactggacctttggccagggaacaaaggtggaaatcaagagaacagtggctgccccatctgtgttcatcttcccaccatctgatgaacagctgaagtctggcactgcctctgttgtgtgcctgctgaacaacttttaccccagagaagccaaggtgcagtggaaagtggataatgccctgcagtctggcaatagccaagaatctgtgacagagcaggactccaaggattccacctacagcctgagcagcaccctgacactgagcaaggctgactatgagaagcacaaagtgtatgcctgtgaagtgacacaccagggactgagcagcccagtgaccaagagcttcaacaggggagagtgctgataactcgaggacggggtgaactacgcctgaggatccgatctttttccctctgccaaaaattatggggacatcatgaagccccttgagcatctgacttctggctaataaaggaaatttattttcattgcaatagtgtgttggaattttttgtgtctctca

SEQ ID NO: 440 - DNA, 3472 bp, Artificial Sequence
  synthetic construct; antibody fragment
aggttaatttttaaaaagcagtcaaaagtccaagtggcccttggcagcatttactctctctgtttgctctggttaataatctcaggagcacaaacattccagatccaggttaatttttaaaaagcagtcaaaagtccaagtggcccttggcagcatttactctctctgtttgctctggttaataatctcaggagcacaaacattccagatccggcgcgccagggctggaagctacctttgtctagaaggctcagaggcacacaggagtttctgggctcaccctgcccccttccaacccctcagttcccatcctccagcagctgtttgtgtgctgcctctgaagtccacactgaacaaacttcagcctactcatgtccctaaaatgggcaaacattgcaagcagcaaacagcaaacacacagccctccctgcctgctgaccttggagctggggcagaggtcagagacctctctgggcccatgccacctccaacatccactcgaccccttggaatttcggtggagaggagcagaggttgtcctggcgtggtttaggtagtgtgagaggggtacccggggatcttgctaccagtggaacagccactaaggattctgcagtgagagcagagggccagctaagtggtactctcccagagactgtctgactcacgccaccccctccaccttggacacaggacgctgtggtttctgagccaggtacaatgactcctttcggtaagtgcagtggaagctgtacactgcccaggcaaagcgtccgggcagcgtaggcgggcgactcagatcccagccagtggacttagcccctgtttgctcctccgataactggggtgaccttggttaatattcaccagcagcctcccccgttgcccctctggatccactgcttaaatacggacgaggacagggccctgtctcctcagcttcaggcaccaccactgacctgggacagtcaggtaagtatcaaggttacaagacaggtttaaggagaccaatagaaactgggcttgtcgagacagagaagactcttgcgtttctgataggcacctattggtcttactgacatccactttgcctttctctccacaggttgaattcgccgccaccatgtacagaatgcagctgctgctgctcattgccctgtctctggccctggtcaccaattctgaggtccagctgcttgagagtggtggtggactggttcagcctggtggcagcctgagactgtcttgtgctgcctctggcttcaccttcagccactatatcatgatgtgggtcagacaggcccctggcaaaggcctggaatgggtgtcaggcatctacagcagtggtggcatcacagtgtatgctgactctgtgaagggcagattcaccatcagcagagacaacagcaagaacaccctgtacctgcagatgaactccctgagagctgaggacacagcagtgtactactgtgcctatagaagaattggggtgcccagaagggatgagtttgacatctggggccagggcaccatggttacagtgtcctctgccagcacaaagggcccctctgtttttccactggctcccagcagcaagagcaccagtggtggaacagctgccctgggctgtctggtcaaggattacttccctgagcctgtgactgtgtcctggaactctggggctctgacttctggggtgcacacctttccagctgtgctgcagtcctctggcctgtactctctgtcctctgtggtcacagtgcctagctctagcctgggcacacagacctacatctgcaatgtgaaccacaagcctagcaacaccaaggtggacaagagagtggaacccaagagctgtgacaagacccacacctgtcctccatgtcctgctccagaactgcttggaggcccttctgtgttcctgtttcctccaaagcctaaggacaccctgatgatcagcagaacccctgaagtgacctgtgtggtggttgatgtgtcccatgaggacccagaagtgaagttcaattggtatgtggatggggttgaagtgcacaatgccaagaccaagcctagagaggaacagtacaacagcacctacagagtggtttctgtgctgacagtgctgcaccaggactggctgaatggcaaagagtacaagtgcaaggtgtccaacaaggccctgcctgctcctattgagaaaaccatctccaaggccaagggccagccaagagaaccccaggtttacaccctgccacctagcagagaagagatgaccaagaaccaggtgtccctgacctgcctggttaagggcttctacccctctgacattgctgtggaatgggagagcaatggccagcctgaaaacaactacaagacaacccctcctgtgctggactctgatggctcattcttcctgtacagcaagctgactgtggacaagtccagatggcagcagggaaatgtgttcagctgctctgtgatgcatgaggccctgcacaaccactacacccagaaaagtctgtctctgtcccctggcagaaagagaagaggctctggagaaggcagaggctccctgctgacatgtggggatgttgaagagaatcctgggcctatgtataggatgcaactgctcctcctgattgctctgagcctggctcttgtgaccaactctgacatccagatgacacagagcccctccacactgtctgcatctgtgggagacagagtgaccatcacctgtagagccagccagtctatctctagctggctggcctggtatcagcaaaagcctggcaaggcccctaagctgctgatctacaaggccagcacacttgagtcaggggtgccctccagattttctggctctggatctggcacagagttcaccctgaccatcagctccctgcagccagatgactttgccacctactactgccagcagtacaatacctactggacctttggccagggaacaaaggtggaaatcaagagaacagtggctgccccatctgtgttcatcttcccaccatctgatgaacagctgaagtctggcactgcctctgttgtgtgcctgctgaacaacttttaccccagagaagccaaggtgcagtggaaagtggataatgccctgcagtctggcaatagccaagaatctgtgacagagcaggactccaaggattccacctacagcctgagcagcaccctgacactgagcaaggctgactatgagaagcacaaagtgtatgcctgtgaagtgacacaccagggactgagcagcccagtgaccaagagcttcaacaggggagagtgctgataactcgaggacggggtgaactacgcctgaggatccgatctttttccctctgccaaaaattatggggacatcatgaagccccttgagcatctgacttctggctaataaaggaaatttattttcattgcaatagtgtgttggaattttttgtgtctctca

SEQ ID NO: 441 - DNA, 3553 bp, Artificial Sequence
  synthetic construct; antibody fragment
aggctcagaggcacacaggagtttctgggctcaccctgcccccttccaacccctcagttcccatcctccagcagctgtttgtgtgctgcctctgaagtccacactgaacaaacttcagcctactcatgtccctaaaatgggcaaacattgcaagcagcaaacagcaaacacacagccctccctgcctgctgaccttggagctggggcagaggtcagagacctctctgggcccatgccacctccaacatccactcgaccccttggaatttcggtggagaggagcagaggttgtcctggcgtggtttaggtagtgtgagagggtctagaaggctcagaggcacacaggagtttctgggctcaccctgcccccttccaacccctcagttcccatcctccagcagctgtttgtgtgctgcctctgaagtccacactgaacaaacttcagcctactcatgtccctaaaatgggcaaacattgcaagcagcaaacagcaaacacacagccctccctgcctgctgaccttggagctggggcagaggtcagagacctctctgggcccatgccacctccaacatccactcgaccccttggaatttcggtggagaggagcagaggttgtcctggcgtggtttaggtagtgtgagaggggtacccggggatcttgctaccagtggaacagccactaaggattctgcagtgagagcagagggccagctaagtggtactctcccagagactgtctgactcacgccaccccctccaccttggacacaggacgctgtggtttctgagccaggtacaatgactcctttcggtaagtgcagtggaagctgtacactgcccaggcaaagcgtccgggcagcgtaggcgggcgactcagatcccagccagtggacttagcccctgtttgctcctccgataactggggtgaccttggttaatattcaccagcagcctcccccgttgcccctctggatccactgcttaaatacggacgaggacagggccctgtctcctcagcttcaggcaccaccactgacctgggacagtcaggtaagtatcaaggttacaagacaggtttaaggagaccaatagaaactgggcttgtcgagacagagaagactcttgcgtttctgataggcacctattggtcttactgacatccactttgcctttctctccacaggttgaattcgccgccaccatgtacagaatgcagctgctgctgctcattgccctgtctctggccctggtcaccaattctgaggtccagctgcttgagagtggtggtggactggttcagcctggtggcagcctgagactgtcttgtgctgcctctggcttcaccttcagccactatatcatgatgtgggtcagacaggcccctggcaaaggcctggaatgggtgtcaggcatctacagcagtggtggcatcacagtgtatgctgactctgtgaagggcagattcaccatcagcagagacaacagcaagaacaccctgtacctgcagatgaactccctgagagctgaggacacagcagtgtactactgtgcctatagaagaattggggtgcccagaagggatgagtttgacatctggggccagggcaccatggttacagtgtcctctgccagcacaaagggcccctctgtttttccactggctcccagcagcaagagcaccagtggtggaacagctgccctgggctgtctggtcaaggattacttccctgagcctgtgactgtgtcctggaactctggggctctgacttctggggtgcacacctttccagctgtgctgcagtcctctggcctgtactctctgtcctctgtggtcacagtgcctagctctagcctgggcacacagacctacatctgcaatgtgaaccacaagcctagcaacaccaaggtggacaagagagtggaacccaagagctgtgacaagacccacacctgtcctccatgtcctgctccagaactgcttggaggcccttctgtgttcctgtttcctccaaagcctaaggacaccctgatgatcagcagaacccctgaagtgacctgtgtggtggttgatgtgtcccatgaggacccagaagtgaagttcaattggtatgtggatggggttgaagtgcacaatgccaagaccaagcctagagaggaacagtacaacagcacctacagagtggtttctgtgctgacagtgctgcaccaggactggctgaatggcaaagagtacaagtgcaaggtgtccaacaaggccctgcctgctcctattgagaaaaccatctccaaggccaagggccagccaagagaaccccaggtttacaccctgccacctagcagagaagagatgaccaagaaccaggtgtccctgacctgcctggttaagggcttctacccctctgacattgctgtggaatgggagagcaatggccagcctgaaaacaactacaagacaacccctcctgtgctggactctgatggctcattcttcctgtacagcaagctgactgtggacaagtccagatggcagcagggaaatgtgttcagctgctctgtgatgcatgaggccctgcacaaccactacacccagaaaagtctgtctctgtcccctggcagaaagagaagaggctctggagaaggcagaggctccctgctgacatgtggggatgttgaagagaatcctgggcctatgtataggatgcaactgctcctcctgattgctctgagcctggctcttgtgaccaactctgacatccagatgacacagagcccctccacactgtctgcatctgtgggagacagagtgaccatcacctgtagagccagccagtctatctctagctggctggcctggtatcagcaaaagcctggcaaggcccctaagctgctgatctacaaggccagcacacttgagtcaggggtgccctccagattttctggctctggatctggcacagagttcaccctgaccatcagctccctgcagccagatgactttgccacctactactgccagcagtacaatacctactggacctttggccagggaacaaaggtggaaatcaagagaacagtggctgccccatctgtgttcatcttcccaccatctgatgaacagctgaagtctggcactgcctctgttgtgtgcctgctgaacaacttttaccccagagaagccaaggtgcagtggaaagtggataatgccctgcagtctggcaatagccaagaatctgtgacagagcaggactccaaggattccacctacagcctgagcagcaccctgacactgagcaaggctgactatgagaagcacaaagtgtatgcctgtgaagtgacacaccagggactgagcagcccagtgaccaagagcttcaacaggggagagtgctgataactcgaggacggggtgaactacgcctgaggatccgatctttttccctctgccaaaaattatggggacatcatgaagccccttgagcatctgacttctggctaataaaggaaatttattttcattgcaatagtgtgttggaattttttgtgtctctca

SEQ ID NO: 442 - DNA, 3592 bp, Artificial Sequence
  synthetic construct; antibody fragment
aggttaatttttaaaaagcagtcaaaagtccaagtggcccttggcagcatttactctctctgtttgctctggttaataatctcaggagcacaaacattccagatccaggttaatttttaaaaagcagtcaaaagtccaagtggcccttggcagcatttactctctctgtttgctctggttaataatctcaggagcacaaacattccagatccggcgcgccagggctggaagctacctttgacatcatttcctctgcgaatgcatgtataatttctacagaacctattagaaaggatcacccagcctctgcttttgtacaactttcccttaaaaaactgccaattccactgctgtttggcccaatagtgagaactttttcctgctgcctcttggtgcttttgcctatggcccctattctgcctgctgaagacactcttgccagcatggacttaaacccctccagctctgacaatcctctttctcttttgttttacatgaagggtctggcagccaaagcaatcactcaaagttcaaaccttatcattttttgctttgttcctcttggccttggttttgtacatcagctttgaaaataccatcccagggttaatgctggggttaatttataactaagagtgctctagttttgcaatacaggacatgctataaaaatggaaagatgttgctttctgagaggatcttgctaccagtggaacagccactaaggattctgcagtgagagcagagggccagctaagtggtactctcccagagactgtctgactcacgccaccccctccaccttggacacaggacgctgtggtttctgagccaggtacagtgactcctttcggtaagtgcagtggaagctgtacactgcccaggcaaagcgtccgggcagcgtaggcgggcgactcagatcccagccagtggacttagcccctgtttgctcctccgataactggggtgaccttggttaatattcaccagcagcctcccccgttgcccctctggatccactgcttaaatacggacgaggacagggccctgtctcctcagcttcaggcaccaccactgacctgggacagtcaggtaagtatcaaggttacaagacaggtttaaggagaccaatagaaactgggcttgtcgagacagagaagactcttgcgtttctgataggcacctattggtcttactgacatccactttgcctttctctccacaggttgaattcgccgccaccatgtacagaatgcagctgctgctgctcattgccctgtctctggccctggtcaccaattctgaggtccagctgcttgagagtggtggtggactggttcagcctggtggcagcctgagactgtcttgtgctgcctctggcttcaccttcagccactatatcatgatgtgggtcagacaggcccctggcaaaggcctggaatgggtgtcaggcatctacagcagtggtggcatcacagtgtatgctgactctgtgaagggcagattcaccatcagcagagacaacagcaagaacaccctgtacctgcagatgaactccctgagagctgaggacacagcagtgtactactgtgcctatagaagaattggggtgcccagaagggatgagtttgacatctggggccagggcaccatggttacagtgtcctctgccagcacaaagggcccctctgtttttccactggctcccagcagcaagagcaccagtggtggaacagctgccctgggctgtctggtcaaggattacttccctgagcctgtgactgtgtcctggaactctggggctctgacttctggggtgcacacctttccagctgtgctgcagtcctctggcctgtactctctgtcctctgtggtcacagtgcctagctctagcctgggcacacagacctacatctgcaatgtgaaccacaagcctagcaacaccaaggtggacaagagagtggaacccaagagctgtgacaagacccacacctgtcctccatgtcctgctccagaactgcttggaggcccttctgtgttcctgtttcctccaaagcctaaggacaccctgatgatcagcagaacccctgaagtgacctgtgtggtggttgatgtgtcccatgaggacccagaagtgaagttcaattggtatgtggatggggttgaagtgcacaatgccaagaccaagcctagagaggaacagtacaacagcacctacagagtggtttctgtgctgacagtgctgcaccaggactggctgaatggcaaagagtacaagtgcaaggtgtccaacaaggccctgcctgctcctattgagaaaaccatctccaaggccaagggccagccaagagaaccccaggtttacaccctgccacctagcagagaagagatgaccaagaaccaggtgtccctgacctgcctggttaagggcttctacccctctgacattgctgtggaatgggagagcaatggccagcctgaaaacaactacaagacaacccctcctgtgctggactctgatggctcattcttcctgtacagcaagctgactgtggacaagtccagatggcagcagggaaatgtgttcagctgctctgtgatgcatgaggccctgcacaaccactacacccagaaaagtctgtctctgtcccctggcagaaagagaagaggctctggagaaggcagaggctccctgctgacatgtggggatgttgaagagaatcctgggcctatgtataggatgcaactgctcctcctgattgctctgagcctggctcttgtgaccaactctgacatccagatgacacagagcccctccacactgtctgcatctgtgggagacagagtgaccatcacctgtagagccagccagtctatctctagctggctggcctggtatcagcaaaagcctggcaaggcccctaagctgctgatctacaaggccagcacacttgagtcaggggtgccctccagattttctggctctggatctggcacagagttcaccctgaccatcagctccctgcagccagatgactttgccacctactactgccagcagtacaatacctactggacctttggccagggaacaaaggtggaaatcaagagaacagtggctgccccatctgtgttcatcttcccaccatctgatgaacagctgaagtctggcactgcctctgttgtgtgcctgctgaacaacttttaccccagagaagccaaggtgcagtggaaagtggataatgccctgcagtctggcaatagccaagaatctgtgacagagcaggactccaaggattccacctacagcctgagcagcaccctgacactgagcaaggctgactatgagaagcacaaagtgtatgcctgtgaagtgacacaccagggactgagcagcccagtgaccaagagcttcaacaggggagagtgctgataactcgaggacggggtgaactacgcctgaggatccgatctttttccctctgccaaaaattatggggacatcatgaagccccttgagcatctgacttctggctaataaaggaaatttattttcattgcaatagtgtgttggaattttttgtgtctctca

SEQ ID NO: 443 - DNA, 4083 bp, Artificial Sequence
  synthetic construct; antibody fragment
aggctcagaggcacacaggagtttctgggctcaccctgcccccttccaacccctcagttcccatcctccagcagctgtttgtgtgctgcctctgaagtccacactgaacaaacttcagcctactcatgtccctaaaatgggcaaacattgcaagcagcaaacagcaaacacacagccctccctgcctgctgaccttggagctggggcagaggtcagagacctctctgggcccatgccacctccaacatccactcgaccccttggaatttcggtggagaggagcagaggttgtcctggcgtggtttaggtagtgtgagagggccactacgggtttaggctgcccatgtaaggaggcaaggcctggggacacccgagatgcctggttataattaacccagacatgtggctgccccccccccccccaacacctgctgcctctaaaaataaccctgtccctggtggatcccactacgggtttaggctgcccatgtaaggaggcaaggcctggggacacccgagatgcctggttataattaacccagacatgtggctgccccccccccccccaacacctgctgcctctaaaaataaccctgtccctggtggatcccactacgggtttaggctgcccatgtaaggaggcaaggcctggggacacccgagatgcctggttataattaacccagacatgtggctgccccccccccccccaacacctgctgcctctaaaaataaccctgtccctggtggatcccctgcatgcgaagatcttcgaacaaggctgtgggggactgagggcaggctgtaacaggcttgggggccagggcttatacgtgcctgggactcccaaagtattactgttccatgttcccggcgaagggccagctgtcccccgccagctagactcagcacttagtttaggaaccagtgagcaagtcagcccttggggcagcccatacaaggccatggggctgggcaagctgcacgcctgggtccggggtgggcacggtgcccgggcaacgagctgaaagctcatctgctctcaggggcccctccctggggacagcccctcctggctagtcacaccctgtaggctcctctatataacccaggggcacaggggctgccctcattctaccaccacctccacagcacagacagacactcaggagccagccagcgtcgagatcttgctaccagtggaacagccactaaggattctgcagtgagagcagagggccagctaagtggtactctcccagagactgtctgactcacgccaccccctccaccttggacacaggacgctgtggtttctgagccaggtacagtgactcctttcggtaagtgcagtggaagctgtacactgcccaggcaaagcgtccgggcagcgtaggcgggcgactcagatcccagccagtggacttagcccctgtttgctcctccgataactggggtgaccttggttaatattcaccagcagcctcccccgttgcccctctggatccactgcttaaatacggacgaggacagggccctgtctcctcagcttcaggcaccaccactgacctgggacagtcaggtaagtatcaaggttacaagacaggtttaaggagaccaatagaaactgggcttgtcgagacagagaagactcttgcgtttctgataggcacctattggtcttactgacatccactttgcctttctctccacaggttcgaattcgccgccaccatgtacagaatgcagctgctgctgctcattgccctgtctctggccctggtcaccaattctgaggtccagctgcttgagagtggtggtggactggttcagcctggtggcagcctgagactgtcttgtgctgcctctggcttcaccttcagccactatatcatgatgtgggtcagacaggcccctggcaaaggcctggaatgggtgtcaggcatctacagcagtggtggcatcacagtgtatgctgactctgtgaagggcagattcaccatcagcagagacaacagcaagaacaccctgtacctgcagatgaactccctgagagctgaggacacagcagtgtactactgtgcctatagaagaattggggtgcccagaagggatgagtttgacatctggggccagggcaccatggttacagtgtcctctgccagcacaaagggcccctctgtttttccactggctcccagcagcaagagcaccagtggtggaacagctgccctgggctgtctggtcaaggattacttccctgagcctgtgactgtgtcctggaactctggggctctgacttctggggtgcacacctttccagctgtgctgcagtcctctggcctgtactctctgtcctctgtggtcacagtgcctagctctagcctgggcacacagacctacatctgcaatgtgaaccacaagcctagcaacaccaaggtggacaagagagtggaacccaagagctgtgacaagacccacacctgtcctccatgtcctgctccagaactgcttggaggcccttctgtgttcctgtttcctccaaagcctaaggacaccctgatgatcagcagaacccctgaagtgacctgtgtggtggttgatgtgtcccatgaggacccagaagtgaagttcaattggtatgtggatggggttgaagtgcacaatgccaagaccaagcctagagaggaacagtacaacagcacctacagagtggtttctgtgctgacagtgctgcaccaggactggctgaatggcaaagagtacaagtgcaaggtgtccaacaaggccctgcctgctcctattgagaaaaccatctccaaggccaagggccagccaagagaaccccaggtttacaccctgccacctagcagagaagagatgaccaagaaccaggtgtccctgacctgcctggttaagggcttctacccctctgacattgctgtggaatgggagagcaatggccagcctgaaaacaactacaagacaacccctcctgtgctggactctgatggctcattcttcctgtacagcaagctgactgtggacaagtccagatggcagcagggaaatgtgttcagctgctctgtgatgcatgaggccctgcacaaccactacacccagaaaagtctgtctctgtcccctggcagaaagagaagaggctctggagaaggcagaggctccctgctgacatgtggggatgttgaagagaatcctgggcctatgtataggatgcaactgctcctcctgattgctctgagcctggctcttgtgaccaactctgacatccagatgacacagagcccctccacactgtctgcatctgtgggagacagagtgaccatcacctgtagagccagccagtctatctctagctggctggcctggtatcagcaaaagcctggcaaggcccctaagctgctgatctacaaggccagcacacttgagtcaggggtgccctccagattttctggctctggatctggcacagagttcaccctgaccatcagctccctgcagccagatgactttgccacctactactgccagcagtacaatacctactggacctttggccagggaacaaaggtggaaatcaagagaacagtggctgccccatctgtgttcatcttcccaccatctgatgaacagctgaagtctggcactgcctctgttgtgtgcctgctgaacaacttttaccccagagaagccaaggtgcagtggaaagtggataatgccctgcagtctggcaatagccaagaatctgtgacagagcaggactccaaggattccacctacagcctgagcagcaccctgacactgagcaaggctgactatgagaagcacaaagtgtatgcctgtgaagtgacacaccagggactgagcagcccagtgaccaagagcttcaacaggggagagtgctgataactcgaggacggggtgaactacgcctgaggatccgatctttttccctctgccaaaaattatggggacatcatgaagccccttgagcatctgacttctggctaataaaggaaatttattttcattgcaatagtgtgttggaattttttgtgtctctca

SEQ ID NO: 444 - DNA, 1353 bp, Artificial Sequence
  synthetic construct; antibody fragment
gaagtgcagctggtggaaagtggtggtggactggtgcagcctggcagaagcctgagactgtcttgtgctgcctctggcttcacctttgatgactatgccatgcactgggtcagacaggcccctggcaaaggactggaatgggtgtcagccatcacctggaactctggccacattgactatgctgactctgtggaaggcagattcaccatcagcagagacaatgccaagaacagcctgtacctgcagatgaactccctgagagctgaggacacagcagtgtactactgtgccaaggtgtcctacctgagcacagccagcagcctggattattggggccagggcacactggttacagtgtcctctgccagcacaaagggcccctctgtttttccactggctcccagcagcaagagcaccagtggtggaacagctgccctgggctgtctggtcaaggattacttccctgagcctgtgacagtgtcttggaactcaggggctctgacctctggggtgcacacatttccagctgtgctgcagtcctctggcctgtactctctgtcctctgtggtcacagtgcctagctctagcctgggcacccagacctacatctgcaatgtgaaccacaagcctagcaacaccaaggtggacaagaaggtggaacccaagagctgtgacaagacccacacctgtcctccatgtcctgctccagaactgcttggaggcccttctgtgttcctgtttcctccaaagcctaaggacaccctgatgatcagcagaacccctgaagtgacctgtgtggtggttgatgtgtcccatgaggacccagaagtgaagttcaattggtatgtggatggggttgaagtgcacaatgctaagaccaagcctagagaggaacagtacaacagcacctacagagtggtgtctgtgctgacagtgctgcatcaggactggctgaatggcaaagagtacaagtgcaaagtgtccaacaaggccctgcctgctcctattgagaaaaccatctccaaggccaagggccagccaagagaaccccaggtttacacactgccacctagcagagatgagctgaccaagaaccaggtgtccctgacctgcctggttaagggcttctacccctctgacattgctgtggaatgggagagcaatggccagcctgagaacaactacaagacaacccctcctgtgctggactctgatggctcattcttcctgtacagcaagctgactgtggacaagtccagatggcagcaggggaatgtgttcagctgctctgtgatgcatgaggccctgcacaaccactacacccagaaaagtctgagtctgagccctggcaag

SEQ ID NO: 445 - DNA, 363 bp, Artificial Sequence
  synthetic construct; antibody fragment
gaagtgcagctggtggaaagtggtggtggactggtgcagcctggcagaagcctgagactgtcttgtgctgcctctggcttcacctttgatgactatgccatgcactgggtcagacaggcccctggcaaaggactggaatgggtgtcagccatcacctggaactctggccacattgactatgctgactctgtggaaggcagattcaccatcagcagagacaatgccaagaacagcctgtacctgcagatgaactccctgagagctgaggacacagcagtgtactactgtgccaaggtgtcctacctgagcacagccagcagcctggattattggggccagggcacactggttacagtgtcctct

SEQ ID NO: 446 - DNA, 294 bp, Artificial Sequence
  synthetic construct; antibody fragment
gccagcacaaagggcccctctgtttttccactggctcccagcagcaagagcaccagtggtggaacagctgccctgggctgtctggtcaaggattacttccctgagcctgtgacagtgtcttggaactcaggggctctgacctctggggtgcacacatttccagctgtgctgcagtcctctggcctgtactctctgtcctctgtggtcacagtgcctagctctagcctgggcacccagacctacatctgcaatgtgaaccacaagcctagcaacaccaaggtggacaagaaggtg

SEQ ID NO: 447 - DNA, 651 bp, Artificial Sequence
  synthetic construct; antibody fragment
gctccagaactgcttggaggcccttctgtgttcctgtttcctccaaagcctaaggacaccctgatgatcagcagaacccctgaagtgacctgtgtggtggttgatgtgtcccatgaggacccagaagtgaagttcaattggtatgtggatggggttgaagtgcacaatgctaagaccaagcctagagaggaacagtacaacagcacctacagagtggtgtctgtgctgacagtgctgcatcaggactggctgaatggcaaagagtacaagtgcaaagtgtccaacaaggccctgcctgctcctattgagaaaaccatctccaaggccaagggccagccaagagaaccccaggtttacacactgccacctagcagagatgagctgaccaagaaccaggtgtccctgacctgcctggttaagggcttctacccctctgacattgctgtggaatgggagagcaatggccagcctgagaacaactacaagacaacccctcctgtgctggactctgatggctcattcttcctgtacagcaagctgactgtggacaagtccagatggcagcaggggaatgtgttcagctgctctgtgatgcatgaggccctgcacaaccactacacccagaaaagtctgagtctgagccctggcaag

SEQ ID NO: 448 - DNA, 642 bp, Artificial Sequence
  synthetic construct; antibody fragment
gacatccagatgacacagagccctagcagcctgtctgcttctgtgggagacagagtgaccatcacatgcagagccagccagggaatcagaaactacctggcctggtatcagcaaaagcctggcaaggcccctaagctgctgatctatgcagccagcacactgcagtcaggggtgccaagcagattttcaggctctggctctggcacagacttcaccctgaccatttctagcctgcagcctgaggatgtggccacctactactgccagagatacaacagagccccatacacctttggacagggcacaaaggtggaaatcaagagaacagtggctgccccatctgtgttcatcttcccaccatctgatgaacagctgaagtctggcactgcctctgttgtgtgcctgctgaacaacttctaccctagagaagccaaggtgcagtggaaggttgacaatgccctgcagtctggcaatagccaagaatctgtgacagagcaggactccaaggattccacctacagcctgagcagcaccctgacactgagcaaggctgactatgagaagcacaaagtgtatgcctgtgaagtgacacaccagggactgagcagcccagtgaccaagagcttcaacaggggagagtgc

SEQ ID NO: 449 - DNA, 321 bp, Artificial Sequence
  synthetic construct; antibody fragment
gacatccagatgacacagagccctagcagcctgtctgcttctgtgggagacagagtgaccatcacatgcagagccagccagggaatcagaaactacctggcctggtatcagcaaaagcctggcaaggcccctaagctgctgatctatgcagccagcacactgcagtcaggggtgccaagcagattttcaggctctggctctggcacagacttcaccctgaccatttctagcctgcagcctgaggatgtggccacctactactgccagagatacaacagagccccatacacctttggacagggcacaaaggtggaaatcaag

SEQ ID NO: 450 - DNA, 324 bp, Artificial Sequence
  synthetic construct; antibody fragment
agaacagttgcagcaccctcagttttcatcttccccccctcagatgaacagctgaagtctggcactgcctctgttgtgtgcctgctgaacaacttctaccccagagaagccaaggtgcagtggaaggttgacaatgccctgcagtcaggcaacagccaagaatctgtgactgaacaggattccaaggatagcacctacagcctgagcagcaccctgacactgagcaaggctgactatgagaagcacaaagtgtatgcctgtgaagtgacccaccagggactgagcagcccagtgaccaagagcttcaacaggggagagtgctga

SEQ ID NO: 451 - DNA, 4092 bp, Artificial Sequence
  synthetic construct; antibody fragment
gacattgattattgactagttattaatagtaatcaattacggggtcattagttcatagcccatatatggagttccgcgttacataacttacggtaaatggcccgcctggctgaccgcccaacgacccccgcccattgacgtcaataatgacgtatgttcccatagtaacgccaatagggactttccattgacgtcaatgggtggagtatttacggtaaactgcccacttggcagtacatcaagtgtatcatatgccaagtacgccccctattgacgtcaatgacggtaaatggcccgcctggcattatgcccagtacatgaccttatgggactttcctacttggcagtacatctacgtattagtcatcgctattaccatggtcgaggtgagccccacgttctgcttcactctccccatctcccccccctccccacccccaattttgtatttatttattttttaattattttgtgcagcgatgggggcggggggggggggggggcgcgcgccaggcggggcggggcggggcgaggggcggggcggggcgaggcggagaggtgcggcggcagccaatcagagcggcgcgctccgaaagtttccttttatggcgaggcggcggcggcggcggccctataaaaagcgaagcgcgcggcgggcgggagtcgctgcgcgctgccttcgccccgtgccccgctccgccgccgcctcgcgccgcccgccccggctctgactgaccgcgttactcccacaggtgagcgggcgggacggcccttctcctccgggctgtaattagcgcttggtttaatgacggcttgtttcttttctgtggctgcgtgaaagccttgaggggctccgggagggccctttgtgcggggggagcggctcggggggtgcgtgcgtgtgtgtgtgcgtggggagcgccgcgtgcggctccgcgctgcccggcggctgtgagcgctgcgggcgcggcgcggggctttgtgcgctccgcagtgtgcgcgaggggagcgcggccgggggcggtgccccgcggtgcggggggggctgcgaggggaacaaaggctgcgtgcggggtgtgtgcgtgggggggtgagcagggggtgtgggcgcgtcggtcgggctgcaaccccccctgcacccccctccccgagttgctgagcacggcccggcttcgggtgcggggctccgtacggggcgtggcgcggggctcgccgtgccgggcggggggtggcggcaggtgggggtgccgggcggggcggggccgcctcgggccggggagggctcgggggaggggcgcggcggcccccggagcgccggcggctgtcgaggcgcggcgagccgcagccattgccttttatggtaatcgtgcgagagggcgcagggacttcctttgtcccaaatctgtgcggagccgaaatctgggaggcgccgccgcaccccctctagcgggcgcggggcgaagcggtgcggcgccggcaggaaggaaatgggcggggagggccttcgtgcgtcgccgcgccgccgtccccttctccctctccagcctcggggctgtccgcggggggacggctgccttcgggggggacggggcagggcggggttcggcttctggcgtgtgaccggcggctctagagcctctgctaaccatgttcatgccttcttctttttcctacagctcctgggcaacgtgctggttattgtgctgtctcatcattttggcaaagaattcgccaccatgtacagaatgcagctgctgctgctcattgccctgtctctggccctggtcaccaattctgaagtgcagctggtggaaagtggtggtggactggtgcagcctggcagaagcctgagactgtcttgtgctgcctctggcttcacctttgatgactatgccatgcactgggtcagacaggcccctggcaaaggactggaatgggtgtcagccatcacctggaactctggccacattgactatgctgactctgtggaaggcagattcaccatcagcagagacaatgccaagaacagcctgtacctgcagatgaactccctgagagctgaggacacagcagtgtactactgtgccaaggtgtcctacctgagcacagccagcagcctggattattggggccagggcacactggttacagtgtcctctgccagcacaaagggcccctctgtttttccactggctcccagcagcaagagcaccagtggtggaacagctgccctgggctgtctggtcaaggattacttccctgagcctgtgacagtgtcttggaactcaggggctctgacctctggggtgcacacatttccagctgtgctgcagtcctctggcctgtactctctgtcctctgtggtcacagtgcctagctctagcctgggcacccagacctacatctgcaatgtgaaccacaagcctagcaacaccaaggtggacaagaaggtggaacccaagagctgtgacaagacccacacctgtcctccatgtcctgctccagaactgcttggaggcccttctgtgttcctgtttcctccaaagcctaaggacaccctgatgatcagcagaacccctgaagtgacctgtgtggtggttgatgtgtcccatgaggacccagaagtgaagttcaattggtatgtggatggggttgaagtgcacaatgctaagaccaagcctagagaggaacagtacaacagcacctacagagtggtgtctgtgctgacagtgctgcatcaggactggctgaatggcaaagagtacaagtgcaaagtgtccaacaaggccctgcctgctcctattgagaaaaccatctccaaggccaagggccagccaagagaaccccaggtttacacactgccacctagcagagatgagctgaccaagaaccaggtgtccctgacctgcctggttaagggcttctacccctctgacattgctgtggaatgggagagcaatggccagcctgagaacaactacaagacaacccctcctgtgctggactctgatggctcattcttcctgtacagcaagctgactgtggacaagtccagatggcagcaggggaatgtgttcagctgctctgtgatgcatgaggccctgcacaaccactacacccagaaaagtctgagtctgagccctggcaagagaaagagaagaggctctggagaaggcagaggctccctgctgacatgtggggatgttgaagagaatcctgggcctatgtataggatgcaactgctcctcctgattgctctgagcctggctcttgtgaccaactctgacatccagatgacacagagccctagcagcctgtctgcttctgtgggagacagagtgaccatcacatgcagagccagccagggaatcagaaactacctggcctggtatcagcaaaagcctggcaaggcccctaagctgctgatctatgcagccagcacactgcagtcaggggtgccaagcagattttcaggctctggctctggcacagacttcaccctgaccatttctagcctgcagcctgaggatgtggccacctactactgccagagatacaacagagccccatacacctttggacagggcacaaaggtggaaatcaagagaacagtggctgccccatctgtgttcatcttcccaccatctgatgaacagctgaagtctggcactgcctctgttgtgtgcctgctgaacaacttctaccctagagaagccaaggtgcagtggaaggttgacaatgccctgcagtctggcaatagccaagaatctgtgacagagcaggactccaaggattccacctacagcctgagcagcaccctgacactgagcaaggctgactatgagaagcacaaagtgtatgcctgtgaagtgacacaccagggactgagcagcccagtgaccaagagcttcaacaggggagagtgctgataactcgaggacggggtgaactacgcctgaggatccgatctttttccctctgccaaaaattatggggacatcatgaagccccttgagcatctgacttctggctaataaaggaaatttattttcattgcaatagtgtgttggaattttttgtgtctctcactcg

SEQ ID NO: 452 - DNA, 2193 bp, Artificial Sequence
  synthetic construct; antibody fragment
atgtacagaatgcagctgctgctgctcattgccctgtctctggccctggtcaccaattctgaagtgcagctggtggaaagtggtggtggactggtgcagcctggcagaagcctgagactgtcttgtgctgcctctggcttcacctttgatgactatgccatgcactgggtcagacaggcccctggcaaaggactggaatgggtgtcagccatcacctggaactctggccacattgactatgctgactctgtggaaggcagattcaccatcagcagagacaatgccaagaacagcctgtacctgcagatgaactccctgagagctgaggacacagcagtgtactactgtgccaaggtgtcctacctgagcacagccagcagcctggattattggggccagggcacactggttacagtgtcctctgccagcacaaagggcccctctgtttttccactggctcccagcagcaagagcaccagtggtggaacagctgccctgggctgtctggtcaaggattacttccctgagcctgtgacagtgtcttggaactcaggggctctgacctctggggtgcacacatttccagctgtgctgcagtcctctggcctgtactctctgtcctctgtggtcacagtgcctagctctagcctgggcacccagacctacatctgcaatgtgaaccacaagcctagcaacaccaaggtggacaagaaggtggaacccaagagctgtgacaagacccacacctgtcctccatgtcctgctccagaactgcttggaggcccttctgtgttcctgtttcctccaaagcctaaggacaccctgatgatcagcagaacccctgaagtgacctgtgtggtggttgatgtgtcccatgaggacccagaagtgaagttcaattggtatgtggatggggttgaagtgcacaatgctaagaccaagcctagagaggaacagtacaacagcacctacagagtggtgtctgtgctgacagtgctgcatcaggactggctgaatggcaaagagtacaagtgcaaagtgtccaacaaggccctgcctgctcctattgagaaaaccatctccaaggccaagggccagccaagagaaccccaggtttacacactgccacctagcagagatgagctgaccaagaaccaggtgtccctgacctgcctggttaagggcttctacccctctgacattgctgtggaatgggagagcaatggccagcctgagaacaactacaagacaacccctcctgtgctggactctgatggctcattcttcctgtacagcaagctgactgtggacaagtccagatggcagcaggggaatgtgttcagctgctctgtgatgcatgaggccctgcacaaccactacacccagaaaagtctgagtctgagccctggcaagagaaagagaagaggctctggagaaggcagaggctccctgctgacatgtggggatgttgaagagaatcctgggcctatgtataggatgcaactgctcctcctgattgctctgagcctggctcttgtgaccaactctgacatccagatgacacagagccctagcagcctgtctgcttctgtgggagacagagtgaccatcacatgcagagccagccagggaatcagaaactacctggcctggtatcagcaaaagcctggcaaggcccctaagctgctgatctatgcagccagcacactgcagtcaggggtgccaagcagattttcaggctctggctctggcacagacttcaccctgaccatttctagcctgcagcctgaggatgtggccacctactactgccagagatacaacagagccccatacacctttggacagggcacaaaggtggaaatcaagagaacagtggctgccccatctgtgttcatcttcccaccatctgatgaacagctgaagtctggcactgcctctgttgtgtgcctgctgaacaacttctaccctagagaagccaaggtgcagtggaaggttgacaatgccctgcagtctggcaatagccaagaatctgtgacagagcaggactccaaggattccacctacagcctgagcagcaccctgacactgagcaaggctgactatgagaagcacaaagtgtatgcctgtgaagtgacacaccagggactgagcagcccagtgaccaagagcttcaacaggggagagtgctga

SEQ ID NO: 453 - DNA, 3423 bp, Artificial Sequence
  synthetic construct; antibody fragment
gacattgattattgactagttattaatagtaatcaattacggggtcattagttcatagcccatatatggagttccgcgttacataacttacggtaaatggcccgcctggctgaccgcccaacgacccccgcccattgacgtcaataatgacgtatgttcccatagtaacgccaatagggactttccattgacgtcaatgggtggagtatttacggtaaactgcccacttggcagtacatcaagtgtatcatatgccaagtacgccccctattgacgtcaatgacggtaaatggcccgcctggcattatgcccagtacatgaccttatgggactttcctacttggcagtacatctacgtattagtcatcgctattaccatggtcgaggtgagccccacgttctgcttcactctccccatctcccccccctccccacccccaattttgtatttatttattttttaattattttgtgcagcgatgggggcggggggggggggggggcgcgcgccaggcggggcggggcggggcgaggggcggggcggggcgaggcggagaggtgcggcggcagccaatcagagcggcgcgctccgaaagtttccttttatggcgaggcggcggcggcggcggccctataaaaagcgaagcgcgcggcgggcgggagtcgctgcgcgctgccttcgccccgtgccccgctccgccgccgcctcgcgccgcccgccccggctctgactgaccgcgttactcccacaggtgagcgggcgggacggcccttctcctccgggctgtaattagcgcttggtttaatgacggcttgtttcttttctgtggctgcgtgaaagccttgaggggctccgggagggccctttgtgcggggggagcggctcggggggtgcgtgcgtgtgtgtgtgcgtggggagcgccgcgtgcggctccgcgctgcccggcggctgtgagcgctgcgggcgcggcgcggggctttgtgcgctccgcagtgtgcgcgaggggagcgcggccgggggcggtgccccgcggtgcggggggggctgcgaggggaacaaaggctgcgtgcggggtgtgtgcgtgggggggtgagcagggggtgtgggcgcgtcggtcgggctgcaaccccccctgcacccccctccccgagttgctgagcacggcccggcttcgggtgcggggctccgtacggggcgtggcgcggggctcgccgtgccgggcggggggtggcggcaggtgggggtgccgggcggggcggggccgcctcgggccggggagggctcgggggaggggcgcggcggcccccggagcgccggcggctgtcgaggcgcggcgagccgcagccattgccttttatggtaatcgtgcgagagggcgcagggacttcctttgtcccaaatctgtgcggagccgaaatctgggaggcgccgccgcaccccctctagcgggcgcggggcgaagcggtgcggcgccggcaggaaggaaatgggcggggagggccttcgtgcgtcgccgcgccgccgtccccttctccctctccagcctcggggctgtccgcggggggacggctgccttcgggggggacggggcagggcggggttcggcttctggcgtgtgaccggcggctctagagcctctgctaaccatgttcatgccttcttctttttcctacagctcctgggcaacgtgctggttattgtgctgtctcatcattttggcaaagaattcgccaccatgtacagaatgcagctgctgctgctcattgccctgtctctggccctggtcaccaattctgaagtgcagctggtggaaagtggtggtggactggtgcagcctggcagaagcctgagactgtcttgtgctgcctctggcttcacctttgatgactatgccatgcactgggtcagacaggcccctggcaaaggactggaatgggtgtcagccatcacctggaactctggccacattgactatgctgactctgtggaaggcagattcaccatcagcagagacaatgccaagaacagcctgtacctgcagatgaactccctgagagctgaggacacagcagtgtactactgtgccaaggtgtcctacctgagcacagccagcagcctggattattggggccagggcacactggttacagtgtcctctgccagcacaaagggcccctctgtttttccactggctcccagcagcaagagcaccagtggtggaacagctgccctgggctgtctggtcaaggattacttccctgagcctgtgacagtgtcttggaactcaggggctctgacctctggggtgcacacatttccagctgtgctgcagtcctctggcctgtactctctgtcctctgtggtcacagtgcctagctctagcctgggcacccagacctacatctgcaatgtgaaccacaagcctagcaacaccaaggtggacaagaaggtggaacccaagagctgtgacaagacccacagaaagagaagaggctctggagaaggcagaggctccctgctgacatgtggggatgttgaagagaatcctgggcctatgtataggatgcaactgctcctcctgattgctctgagcctggctcttgtgaccaactctgacatccagatgacacagagccctagcagcctgtctgcttctgtgggagacagagtgaccatcacatgcagagccagccagggcatcagaaactacctggcctggtatcagcagaagccaggcaaggcccctaagctgctgatctatgcagccagcacactgcagagtggggtgccaagcagattttcaggctctggctctggcacagacttcaccctgaccatttctagcctgcagcctgaggatgtggccacctactactgccagagatacaacagagccccatacacctttggacagggcacaaaggtggaaatcaagagaacagttgcagcaccctcagttttcatcttccccccctcagatgaacagctgaagtctggcactgcctctgttgtgtgcctgctgaacaacttctaccccagagaagccaaggtgcagtggaaggttgacaatgccctgcagtcaggcaacagccaagaatctgtgactgaacaggattccaaggatagcacctacagcctgagcagcaccctgacactgagcaaggctgactatgagaagcacaaagtgtatgcctgtgaagtgacccaccagggactgagcagcccagtgaccaagagcttcaacaggggagagtgctgataactcgaggacggggtgaactacgcctgaggatccgatctttttccctctgccaaaaattatggggacatcatgaagccccttgagcatctgacttctggctaataaaggaaatttattttcattgcaatagtgtgttggaattttttgtgtctctcactcg

SEQ ID NO: 454 - DNA, 1524 bp, Artificial Sequence
  synthetic construct; antibody fragment
atgtacagaatgcagctgctgctgctcattgccctgtctctggccctggtcaccaattctgaagtgcagctggtggaaagtggtggtggactggtgcagcctggcagaagcctgagactgtcttgtgctgcctctggcttcacctttgatgactatgccatgcactgggtcagacaggcccctggcaaaggactggaatgggtgtcagccatcacctggaactctggccacattgactatgctgactctgtggaaggcagattcaccatcagcagagacaatgccaagaacagcctgtacctgcagatgaactccctgagagctgaggacacagcagtgtactactgtgccaaggtgtcctacctgagcacagccagcagcctggattattggggccagggcacactggttacagtgtcctctgccagcacaaagggcccctctgtttttccactggctcccagcagcaagagcaccagtggtggaacagctgccctgggctgtctggtcaaggattacttccctgagcctgtgacagtgtcttggaactcaggggctctgacctctggggtgcacacatttccagctgtgctgcagtcctctggcctgtactctctgtcctctgtggtcacagtgcctagctctagcctgggcacccagacctacatctgcaatgtgaaccacaagcctagcaacaccaaggtggacaagaaggtggaacccaagagctgtgacaagacccacagaaagagaagaggctctggagaaggcagaggctccctgctgacatgtggggatgttgaagagaatcctgggcctatgtataggatgcaactgctcctcctgattgctctgagcctggctcttgtgaccaactctgacatccagatgacacagagccctagcagcctgtctgcttctgtgggagacagagtgaccatcacatgcagagccagccagggcatcagaaactacctggcctggtatcagcagaagccaggcaaggcccctaagctgctgatctatgcagccagcacactgcagagtggggtgccaagcagattttcaggctctggctctggcacagacttcaccctgaccatttctagcctgcagcctgaggatgtggccacctactactgccagagatacaacagagccccatacacctttggacagggcacaaaggtggaaatcaagagaacagttgcagcaccctcagttttcatcttccccccctcagatgaacagctgaagtctggcactgcctctgttgtgtgcctgctgaacaacttctaccccagagaagccaaggtgcagtggaaggttgacaatgccctgcagtcaggcaacagccaagaatctgtgactgaacaggattccaaggatagcacctacagcctgagcagcaccctgacactgagcaaggctgactatgagaagcacaaagtgtatgcctgtgaagtgacccaccagggactgagcagcccagtgaccaagagcttcaacaggggagagtgctga
